United States Patent Application Publication US 2026/0357256 A1 - sequence listing, part 14

SEQ ID NO: 9 - DNA, 58617616 bp, Homo sapiens (residues 28,223,300-30,394,322 of 58,617,616)
  source 1..58617616: mol_type = genomic DNA
cttgctctaccacccctctgcaggcaagcagcatcaggcaaggtggggctttctcctctcttgttctggactctctgtgtttgtcagttcagccaaaagttccccttaactacctcaaaatcatttcagatcttgataaaattgaacaggagtctgccattgaacccttgtcagtaagaacaaaaactgtagcagcagctgcgtgtctctttcctgagaaccgaatagggactcctttgggtgctgttttcagataatacagcttcttcaatgtgacacacaggagtcccacccggtagcaggggtgcattttgagttctttgacagtactgttatcagatcttggtcaccatcctagaccaagatacccacattctgaaggcattggggtatcagagaaactccttacagtttccgagtttgaggccatttttcttcctcttcactaataaatacacgaagattgggatttgtgtgtgttgagctcattttaataacaggcaacaataactgtcctgtttggcctcagcaaaaagtccagaaagatgctagagtattccatgagtatgatacagaggtgaaaggagatacgcaagaatctccttttcaaggtttacattctggagtatcccaggtcacgttttctaacagcaagcctgagacagggattcttgtataagtaatcatttgagagatgctctcaggtgagtttgctagaaaatgagggaaggagaagcagccgcgtgctatcagcagaagtctcttttccacccgattctatgggttctctggagcgtgaatttcaccacagacatgagcaaggtccatccttgtaaggggagaaaagaggggcagtgcctaaccctcagacatcaacagcagataactattctcctaaaaaggtgcaggtgtgagccattttcagctgacacccacagcaggcgagaagtggttgcactggccagataaaaggctcctgggtggggtaccaacagtggctactgtagggggagacctgtccctgagctaaggcagagggaggagcagagtcctgcagcacagccatggccacttgggcctcccagtgtgtaccagggcttctgcatccctccaacatccattcaatactcattaatgcacctgtgctatgtaccaagcactgtgccagactctggggacacagcactgttggcgccagacgtggttcctgcgcccacgcagcctacatctcacagaagtgaaaatcattgagcatggacaacgccggcaggaacttcaaggcatggcagtggagcatcatggctaggagcatggactctggactcttggttccttgtgggtcagccatgtgacctcgggtgagtgactcatcctttttaagcttttgtttcatcgtggagaagaaaatggcccccacttacttttaagatttggcgtatgcgtgaagattaaaccagataatgcatgtgaggtacttagctcaagacctggcccagagctgcttcctagtaatgtgaaataattataataataatgttatcattgttgttataacattggttacaaccattcaggaagatggtttctcaatgactgttctctttgtatttctttgtgcactgaatcatgccctgtggcgggcactgtgctgggcctgaggtcatggtggagggcataggcagtgacactctggctcagtgtcctgggggaggtgtctgactcctccccatctccttaaattcacttcatctttgcaccagccagctctcctttcctcaccagggctattatcaaattttgaaaatttctagcagttttccttaaatattaatttcattttttgctttttcttttttttcaacttttattttagaatcagggagtacatgtgcataattgttacagaagtgttaacatattgcataatgctgatatttgaggtatgatggaacccttcacccaggtagtgagcatagtacccaacaggaagttttccagcccttctccctccatccctccttctcccttttcatagtccccagtgtctactgttgccatctttatatccatgtgtccgcagtgtttagctcccacttacagttgagagcatgcagtatttgactttctgttcctgcattaattcacttaagattatggcctctaattatattcacgttgctgcaaaggtcatgattttgttcttatttatggctgcatcatatttcatggtgtgtatgtaccacattttctttaatccaccattgataggcatctgggttgggtccatgcatttgctattgtgactagtgctgtgatgaagatatgggtgcatgtgtccttttggttgaatgatttattctactgtggttatatgcccagtaatgaggttgctgggtcgaatgatagttcaacttttagttctttgagaaatctccaaagtgccttccactgtggctggactaatttacattcccactcatggtgcataagtgtctgcttttctctaacaaaagccattctgattggtgtgagttggtgtctcactgtagtttcgatttgcatttctcagatgattagtgatcatgagcatttttcatatgttttaagcattaattttaatttctgagaacaaggctggaatattcatctcaagaatagctgatccaatccagtgtgtcataaacatggaggcagagataggcactatatgtttctaagcaggtctgaaactctgctcagagactgcgctggacaggtctcccagatcttcaaaaagtatctgtggttcctcccctcttcacacacagacaaacacacatacacaaacccaagataacattttttcctccaatacccagggagctctgaccgcaggtttggctgcccagtgcttatgaaccatgtctccgatgattttataatctcctccattaactgcactaacattttaatgagtcttggcatcaagtagttatctgcagattttctggtaaacatgcagtagaaaagttaattttttaaaaaatcacatatttttcctacaaaactcagtgtaagaagaatctgaatgatctgtgcttctagaatacttttttttgtattagtttattcatatagctatttgctcttctcctaggactttattgtggcagggtggggtctttaagacctctgtatcacatcactttcaggaagtggatctatggagaatgcagcccctttactcaacacctccaagagccggagcctgtaaaataggcaggaaccgacaaactgcagcaggaaagaaatataaaacataaatagaaaatgattatctcatcaagtagccatgcccgagtccacgatgcattggctcagctctgctcctacatccaacagaaagttccttgcttttcatgaaagagctccttgtgcagtctgatcattcacaagaccatttaattccaaatacaattcggccactaatttcaaactgttatcaaatgtgacagacaggtttgtttttagctcccagtagatgaatggtctgctttaaaattgaacagataacaaaggagatcaggactgagaggcgctagagaaatgaaaacattttctagctcccagtagccaagctaaatctttgcttttttggcaggttactcctcaattaaacatataaaggcaaaagagccagcaggaccatcctgaagcaagctggatttgtgccgttcagctgtgtgtcacagccagccccaggggccagggattcctaatcaacattctcccatgcagacatgggcagggcttttattttagagggtcttaaagaactagaattacatattcctttttagaaatatcaagtgcatctttcctcaggttctctgcaccaacattttttctttctgaccggacattttatatatatatatcagaaaaataatcagtctgcctagaattcccaccttttgactgacaggaagcaccttatcaatgatagcctagctttgtctgaaatcccatctgttttcagacaaacacaatctctacatttttaagagacctgatgctaaaatatgaattacagctttggggacagccattcccaacacacatgaacaaaagaaactaatatatagcatattcaaaactgatactcttcaacctttcttccttgatgcaatgtcagtgagcctcggcatccctccagggtgagggcagatataatagggtagagatagatcgcattgtgcaatgtcaatatcaatttgaaccacctgctgttccttatttattcttatcattgattctacaactttttgcccatatcatgcagttaaattcttcctaatatgacaagccttaaggatttatagacattttcacatgctatagcaaattaccattcttgctagagttctggtaacaacccccagtgggaaatggtaccaaaaaaattgaagatactatcaaagtgatccccggctgctgagatggaaatgaacacgagtcatttttagttaacatcaaaatgaaaaacttaagtcgcagccacatctcagagtgtacgagaaaaacaaatcatagttctcttctatgctgctggcttttaaagattaaccttgaaaggaaaggggacaaaacaaaaagttggtttatgctatatacagtatatagtgccctccatcaacaacgcagggactcacttatttcttggtgagtccgcacttccttctgggtcgctctattccacctcaatttttactttaatattaatatccatacattgacaaacacaccgatgttctcccacacaagacctagcattcagatagtgacttaaacctgcttcttttttcttgcagatgttcccgagactgtggacttgggccttgccaaggctgacaccagaaatgactgcacatatttaggagtaaagaacacaggaacagaaaccaaataccgtatgttttcactcataagtgggagctaaatgatgagaacacatggacacacagaggggaacaatgcacactggggcctattggaagagttgcagggggcaggagggagaggatcaggaaaaatacctaatgggcactaggcttaatacctgggtgatgaaataatctgcacaaaaaaaccccaggacccaagtttacctatccaacaaacctgcacttgtacccctgaagttaaaataaaagtttaaaaattttaaaaaaacaaaacaaaaagaacaggacttataggagacccatcgccaccatcacccggccctataccacatgcccctcttcttcctggctccatccacagcctctccctccagccggcccaccaggtgccccagatgaggttcacctccctaaggccacgtgtgctgcagcttggtcatggatcttttgtggccggcttgagcttggtgatttctgtgagcatctggagggcagagctgaggtctgattaagtcatgcttcttcccaggtcaccctacaccaacatggcaaaggcagcctttagttatttacttcagttttgttgttgttgctgttttttaatattaggtggaaccacataaaatcaacaatattcagccattgttgactcagtccattgagtgtcactcagtcccaggctgaaagcctgagaatctggggccactggtgcaagtctcagagtctaaagactagtgaacacagactgtcaaggacaggagaagaaggatgtcccagctccgagagagagagagagaaaggagaaagagagagagagagagacagagagagagaatggcttttactctgctttttcatcctatccaggtctcagctgaccagacagtgccttcccacattgagggctgatctgcaaaactggcaatttcatatgacttattttaatggatgaaacaaatgagtccatggcatccattccttgtaatgctaactttctcaagcgcctagagtcaagttttttctaggctgtatgaaattttacacaggtcctaagattgtacacattgtcttttatttgcctgactaataggttgcctggtaatgaggacttattggcccaacaagctgccagtgaaccagaatgctttaaacacaaggcaatggcagaagcccaccccagctcagagaggagcttctacttagccccctggagcttcatgatgttttcttcctcttaatggcaaaggtacaaatctccactctgctgttgctgccaagaaacacaagttccttaatgaccttttatattttcactttttctctaccttctctccattcttagagctaaaatgagaaaagaaaaagcttttttcgttgaaggcagttgaaaacttaaattaagacaataatttaaattttcttcactatttttatttttattttttttagatggagtctcactctgtcaccaaggctggagtgcaatggcgtgatctcagctcaatgcaaactccgcctcccaggttaaagcaattctcctgccacagcctcccaagtagctgggattacaggcacccaccatcatgaccggctaattttttatttttgtagagacggggtttcaccatgttggccaggctggtcttgaactcctgacctcaggtgatctgcctgctttggcctcccaaagtgctgggattacaggcatgagccactgtgcccggcctgcagcttttaatattatcacaactaatcagtcacctgacacatagcacttcacaacacttttaaatttgtcatctcatttgatcccttagatcatttgatccctacgtgatctaagggatgactcttcccatttttcatctgaagagactgaggaattgagagtttcagcgtctttctaaaggtcaccccagcaagcaatacagcaggaggcctttcaaagccagcgccctttgggctggcctcactgtctcttctgggaagagggtgaacactctagaaagagtctccacataagcatagacatgtgcccatgactcaggagcttacggggatcagcaggtgccaattcaagaagacaacacagagcagagagcatggaggtgaaccagggagtgcatgcctcgcctaaagtaccaattatccttaggagtcaccagatgtacacctggtcactcagatgcctaatgtgacacctgacacattaaagaaaaagaaaaaagagcaaggcaagcagcagtagaaaaagaaaaaaaaaggaaaatctctgagtcacaagaaagtggctggaattctagtttaaaaatcatatcatcaatgtaagtctgaggccagcccccctccccccacctcaagactgcacctctccatcacagacactgacccctagctggttccaaataactcaattgcctggaggaagatacagtgtaaagtgcagagttacaactgtatgttcattttttttcttctctgtacagctcatcaaacctaccggcccaggccttatgaatgccttctctcagacccagcagcctgccagggagggcttcaaagggcttcaccatcaaactcattgctcataaaatgagaaaatcttgttattttaaaggcttgtacatctaccatgacatgcttaggcaaagcagacaccaagaagcaccccatgtgctgaaactctagtgaccgcatagggactatttcaattcttagtttgtatttgtttagaggctgcagggaactggccttggtgtgagttctagaaaattaaaaagaggttctaattgtatttcatattgcagcttttatttcaatctcagaagctttcttaaagctcagaaagcttttaaaaagcgtaagaacggtgagaagtaatttcgatatttttgctctttatttagtctattgaagcaggactctccaacttagatgcctatagaaatgtaatgtgagtagatgaagtggtcttgggatattctctcaacagatacttgtgaaagtaaagtctatttccacttgtccattaagctaagaaaggcatggtttcattctaattttcctgaaacatgtgtttctcacaatctttccttcacttctgatagaaacaagagtgttagtttgggtttcctaaacacaaaaatctgagacaagggtttggtaacaagtcatttctctgagaagtgatcctctggtggagagaagtcagacaggacaagagggcaagggaggcaatgaagagcgtgctcccaagcactgtaggcagtcaggctccacctgctctctggaagccgggggctctatgggagaaagaatggagcttgctgcagttactttacctgggggcaaggcggtgaggactcttatttttacccaccaacttctgtctgtcattgtttgttggctgctctgggtagcattaacttcccagcacttctggcctgccccagtgtggtcttgggcatgagaggggagcatggagcaaacatgtagggcaccaagagcatgtgctacagggtcagtgaagagtcaattatcctatctctcttctatcaaacccaaagcacaggaacaatggttaatgagcatctgatgctccattttcatgtcagggatcaacagggagtggtgtaggaggggacaacctggtgagtgtctgaactgtcaagaagggcagtgacaggtcagctccagctgacagtttccatgcaggagtgcaggtgaactttcccaggtcttctctttctccagaaagctaggaatctggctctttatgcaacatatgtaacttataaatgttagcaactaacaaaaaccatgttaacatctgcagggatatgcatctcagggctgaattttcctgtgtgtggccagtttctatcttctgatataaagttttgttttagtacctactctatgcccagcattttcttgggtgatatgaggaacttagacctgtttcaggtcacttacagatgtcctagtgggtggcaaagatagttgcaggatgacttagaacatagcacgcatccatgcaacagacagaaaaaaaaggctgctaagattgaagaggcacaagattttaaagaaaaacaaaacacaactaagccttttattgttgaacttaaagacatccatcaatactgcttgacattaaatgctattgttgaacatatatgggagcttaccgtgtgtggggtacagtaccaacaaagtcaaaaccaagtcaaagaccagagcatcaggcagaagaaagaaggtttagctcacgtggcaggggatagaatacctaaaaatatggaatcaaaattttgacgcaggtgaaggttttttttgacacttttacatctcataagttcttttctgaagccatgctcatgtcaggaattttgtaacctcatggcccactccctgctaatctcagaactcccttgaccaacatgtggtccctaagcctctcccatgtggtgtgtgtgcagggtcctcagatccaggaaggggctgagtcagacattttctccaaaggaacttacatgcacctccagggatgcacaggaccatccactgggcgcaggacaaaaacgttgaacaagaaaagcgtgttaatacatgattgtctctggatctcgctctcagatattttatcagatgaacacatgtcccatgtggttcatgaggtcccttgagagagagaggagtttcatcaatcagaagcaagtgtggtttttgcaggttacttggcttggttagtggacttatggatggtgacatcttgttttaaccaaaccaacattcaccaatggacaggaggcttatgaagattcctacagagaaagctgcagactggagataatattgtttctgagctgaactgaggtttgcacagtaaagccaaacatccacactgaggctttgcagcgggagaaaggaggtcatttatttgcagggcaccaaacaaaaaaaaaatcaggcagctcacgcttaacacctggcctccccaatggctcacaagcatgggtttttaaaggcataagctgagtggaacttgaaatgacttctcagaaacaggactttaaatgggtttttaaatttcaggaaagcagaagttgtaggcaaaaattataaataaatactggagttaatacatttatttggactgaaagatatcttgaagtgagggcttacaggtcttacgtagattcaaagattttcttatctgcaattggttaaggaagagaagctttgtttaaaatgttgaggtcagggaaaaaaatgtgaagtctggcccatggccataacttactccaggaagaaatttagaagagagaaaggtggccagagctcagtcctcagttttcctctctccaaggtctaatccccgtggatctatttggtgggcgtcctcagtagggaatagagtttttgaaacacaactcaggatcatataagatgttatctttagtttctatagaaaccaaacatctcctgattctaacttccttggctattgttttaagctcctatttattaccttcttgcttatcaagttgtttatttacttctcatggatcactgggctccttgaattttccttgaaggaacataggatttttatttattcccatgcttggggtggtggggctggcaggctcctcagaaagtgttcctgcttcatctctttactgatgatacgagcacaatggagcagcaaaacggggtgatagaactccatctcccagtttgagctcctttttagccacattatgaggttaaaaaccatgattatcttattagataactggtccaaaaaggtcagcaaaaatgaacaaaacactcaagtgattttgtatctgttgtcattaataatgataggccctaagtaccaattgtgcctttaaaaattagataaagatagtagtagtacatatttataatttacaaataaataaatattgatctactgggaggacaggctgaaaagtctttactaatggagtgcatgaagaaaactgaactagatgaataaattagttggaacaaataaatgaggaaggaaaataaagtactataaaagggaaaacttctatatcaaggttatttcatcatgagattcaaacaacataattaattacacatatttaacacatcatccaaaataggaaacaaaggaaaacttggacttgaaattaccgatcctccccttatcagcaggaaataaacaaacaaataaaaccagaatcgtgtctgagctttgacaccagtctacagaaggtatatcataaagaaatcgccgttctagttcctgagcctcatcctgaccaaggcagattggagagttggggcaaaagcagagacaccatccaatgaggcactaattttccacaatgttttccccaagtcattcactgacttttcaaaaaacaccgattcaaggcaaagaggcacttttgctgtagaactgggtcatgctgcactgaaattcttctttgcaccaggctctggctgcctctcttgtcctgctgattggctttttaataggctctgtgaggctggttaacttttcagtttgagtcatgcacacaagttcatctgggtgttgacagccgcattcctgtgcccggcttcatagcagttcggagctgcactgtagagcattctccactgagctgagcggaacttgaaatgacttctcagaaacaggacttcaggtttctttaacctatttgctactctttctcagcttaactaacaaatatcttcctgttcctctacgtgtgaacttttttgttgttgttgttgaaatgtatccagtaaatcggaaaaggccaaaataatcttcaggaaaaattatctgatttcagaaaattgcaactatcataagtgtgtgtgtgtgtgtgtgtgtgtgcgcatgaaaatctccatctcctcattctcaaacaaaaaagtcaaggtcaattatgtgtcaataaagcatttttaaaaaatttcatgacttcctaagagcacagtttcaaataggacatttcccccaaagcaacccaaaagtgaacagaggaggagccagctcagctgacctgaccaggtcccattggtctcctctcccatcttttaatggatccacctgaccggaacccactgagaggacgccctgatggctagaggctcacgaaggcttgtgccatcactgtgattctccaattctctaaaagcctgttttcaggaacgtctaggtgtttgacacagttaagtgtttgctaaaatgcaatcgtttcagatcagctgaatagaaattagcaggtggtgaccacattttataatatgatttttgaagaagtataactatttgctttcttcaatttagttttttaaaaaccaacttccttacgagaagcaggtttcaaaagatattccacactaaagttactcatttctctaggatgcttccctcttcctgccacctttgagcttctcagtgctgtgactgtgtcctgctcctctttatacccaacttccctggtgagtaacagttgcctgagaagagtgcagtgattgaagaagaagtaagtgggtgggtggctgatttccattttaacctatctcattaagagctgcatagtgggagagagaacaaagcctttgaagtcagtctgagcctgggctctgatgctcactaactgcataacctctggccggtaacctcgagccctacctcatagggctgttgtgaggagtaaatataagcatgcttgtaatagctttccctgagtctgctcagctccctggctacctcctgttctcccacgtgaacccactgtttatggaggtgactgcaggtctgatcacctaaactaatgaaaggggtgatggagcagatcctagggagccaccacagggcagagaggtgtctgaagagaagacagtaatgctcctctctgcttacctttttttaagtttctgtcaaatgggcctgtttgcgggtggatgcagtacctgcccaagcccctgcccagtcctgtgctaggcactgggtgcacagagtagtcccacccatgggtggttcatgttcagccagcacagcaagccaccatctggcagtgaacacaccggtcatgtccccttgctggaactaatcatggcagccagagagacacaaagcctggctcattgaactgaaaggagaagagtagctccctctcacacatcatgtgcttttacgagaagacaggcacgcctgccgcgtgccccatccagctccaggggcccagctgtgttgtgcaaaggaaggctttagacggaggctgacgagctggctttagatggaggctgacgagctggcttcagaaggagccccctgggcaggaagcggccctgcctctgatcttgaatttgaccaactgtgaaccagaatggagaaagggggatgttcaccaattagctgaaagtaaaactcaactcaaacttcaggagcccaaagtggcgatacctcgagccatcccctggcattcttcttatgggtatgaacagtgctgtgagggtgggcagccactcttgaggggctctgactgccctggaagaaaagaagaaggaaattcaagagctgtgagtgcagtcagaaactccagtgagttccaaaaacacaggaagttgagattcaaggtaaaacagaagagggcaaagaacatctgaatctttcactccactgtatcagtaagtccacatttagatcacgcttcctgagaggagggctatgccttatatatcttttcttatttccccatcgaatagttcccagggcctggctgagtggtagtgactgcagtgacagtaacagccattgcttactgtgtacagctatatgtgagtgctttctagacatcacctcattcaatcttctccataatctagaagtaggtactatttatccctactctgtagatgcagaaaggcagtctcagaatggcagagtgaatgggccaggggtgagggctcacacctataatcctagcactttgggaggccgaggcaggtggatcaccagaggacaggaattcgagaccagcctgtccaacacggtgaaatcccatctctactaaaaatacaaaaaaaaaaaattagccgggtgtggtggtgggcacctataatcccagctattcgggaggctgagggaagagaatcgcttgaacccgggaggcagaggttgcagtgacctgagatcataccactgcactccagcctaggcaacagactgagactctgtctcaaaaggaaaaaaaaaaacgaataacagagtgaatggctcaagattacacagccaggaagaagcagggccagcttcttcccagcgtagctctagtgacttagtctctgcccttactcaccattctgccacctttgacgtaactaaccacctaccatctctgacatgacctccccttctctgtgcagccttaaatgatgtctgcttcatttccagtgggtgtggcctccagaaaaggaaattggaaagaacgtggaactctcaacaacgaaagcaatgaagctgccttgcttaaggaggaaaggatggtggtgaccaagtttccaaccttgctgggtgggacaagggcagagaggagcacccaggacccttcactcatgtgaccagcctgaggcagagcaaatggggctgcttaagggcacagctcttctccctaccgaggcaaactcactgtggaaggggctgtttccaagcacctatgatgttgaaacagcaaagttataaccggtcagaaattgcacctttctaaaaagaaattatgacaattagcccacataaaaacattatttccttcaacataggcttgaaattcaaaaccactatactataataatttttcattttcatgggtgcaataattattgcactagagataatggggcccatactagaaagcagaaacaattgccctggtttaagagcttattaatgaacaatacagccatagtcaattaaggcacaggaaggaaacatggctgctggtgactggtgggttggttgctagatttaatttttgttattgggtcagtaaaggcaggaagaaaatacttctcaagtgggagggaaggaaattacaaatttgatgaaaataaatcaccttttgagcttttgagtctttccaattgaggcttggttaatgtaggtgacagcactttctgcctgtgacttggcacagggttattgggagccatttgtaacactcccattctgtctgtaaaaagacattttaattgaaaaatcatttgcccataaaattattatcatcaatttacagtccaccaaagggctgcattatgaccataaaacaatttgtagtggattcattttactcactaaatcactttacattatactgtgaacagaatgattaaagcaagttagcattttgttggcaaagtaattacattattatgcatttcacccacagagatacttctactactgagtccatttgtcttgttgacagaatatctatatgcattggacagaatgcattttctttagttgatgcaattaattttattcaccagacacttttaaacctaagctaaaatgtttttgtcacagaaatagatttgattggggaacaaaattaatcttgcctacatgatttgtgctcagaaagtttcttccaataactgtgcaaatttgcaaacaagtaaacagggagaaaataataagcaagagcaaaacaaaagcctcaaaaagcaattctcctcctgggtctgttttttaaagtcctctatgtacccaggcaggataaaaatccaaagacaccttgaacaggtggagcaggagatggtggtgaaaagagaggggcttctccaacctgaacaatttggctgggaaaatagtgagcacagattaatcttttaaaaagaccccacacaattgcttgagaagcgcctcagctagtgtctttttgtcaccaactttgtatcctagcggtagaaatgactttggactttcctggggccggtgccaggctctgagtgtagtcaggcttgtgaggcagaagtgaagatctcaggcaccccaactgtgtcccatacaagatgcctaaatgggttgtctaaaaccaaacacgagaagcagaaaatggcttgtcttgcacagtgggcattgggcccacctgtttgccgctggaagtcccaggcttcgaaccgcagtcccctccttgcaagaggcccaggacctcagccaccaccagagggcaggaaaccacatctcactctccctgaagcccccacagcacagggcttggcatgcgcaggtcattctggaaagacttccagattcattccctcattcttcaactcctattttctgagcacctactctgtgtcctaaaaagttcagcagtgagcagaaccctgctctgagcaggctgaccacctgctggagaagtcagacaggtgaagaggaaattaagacacagacagtatggggaggaggttccttatggtgtgggaacagttctgtatcttgattgtggtgatgtctatacaaatctccatacaggtgacaaaatttcctagaactgtgcacaaaaacatgcacacacacaaaaaaatgagtccatgtaaaaactggtgaaatctgagtagaccaggtcaattgtttgagtccaggagtttgaggcagcaatgagttgtgattgtgcaactacactccggtctgggccacagagcaagaccctgtctctaaaattaaaaacaaattccaaagtgtaaacaaaaactgaacaaatcagcaacttatttgtccatcgtagtctagtagttaagcacattgtgccaatgccaagttcctgattttcataatgcactacagttatataaaatattgccataggtggaggctgggagatgggtataactctgcacttgttttgcaactgctctgatctataactatttcctaataaatggtttaaagaaacactgatgtgcaaagcactgatggaaaacgcaggaggctgcagaagtccaaagaaacgctggattcttgggggcagcagggaaggtttcctggaaaaactcatatcttcccaaaggcaacccagttaagtgcccagaagggtcagcaggaggggaaaagtgaagctgggagtgacaggcagcagaaatggaggtaactgtagcacagacccagtcccaagacattcagattcaaattgtatttaaatgctggagagttttggctaagctgaaatttaaaagagatttaggacccctaaaggggaagattggctgagaggaaaaataatccttcaggtctgaggagtgttggaaggacacgctggaggcccctcctttgtagtcacgtggctagcaggcacctgcaagctgaaacgtgtgggctggagggactgcggcagtgacatgtctccgcagacctggctgccattcctggttcactggctacacccagctccatggcacccatgtctctgcacattttccccatagaacacatgtaccttattctcccaggattctgccaggtagctctgggcttcatcaagacaactgccacctgctgccacacactcccgcacatcacaatggtgaaatatggggcccacaggcaaggtggagggatgagtagtttggctggagaggctttattccatcaagcccctactgttatccatccatctaaatcatacaactcaggttatcaacactccatgaaacaaccactccaaacttcctgctccaggagtttttattatgaagaccatccaagcctaagcaacaagcaaaaccctgtttctacaaaaaaaagaaaataaattgaaaaatttttctggcatgatggcacgtgcctacagtcatgactacttgggagactgagataggagaattgcttgagctcagtagttcaaggctgcaatgacttgtgattgtgcaactgcacttcagtctgggcaacagagaagaacactgtctctaaaaataataaataaataaaagtccaagtgtaaacaaaaactgaacaaatcagcaacttatttgtacattgtaaaaacatcacagctgagcacttataagttccactgggaaagagacacagggtctgcagccccagatacaataagaaaagtgactgctgtctgacactgagctttatacagattcccgtggagtgcacacagcaaccctgtggaggctgatgctgtatcatcatcatgcacattttatagatcagtgcatgcacaaaaaggttagataacttgcccaagggtgtgcagtcagtatgtgctgggaccatgacccaaatgcagggtgttccgttttctcttccactcaagcaccagctcctccactgtttccatgagcatctccactcaccttgcacaagattgacgcctttccagctccccagactggagctaaggaagcttggagtagctaaggaccattccctgcaacacctccagacacacctcctgacctttatgatacacctggaagacaggtgcatcccctgaaatcccttggaccaaggacaagatccttcagtagcccttggtctttcttgagatacagggaagctttgtaagattcccattaatgaaatatttaggtgatacttctctcacttcagaaaacaaatgagaaaaggagttttgcttacagtacattaagttactttaaattactggaagccatttgtagataacttcctggaaaatttgaatatggataaggatatgttactcatcagcctgacactttcataaaataccctccaaatagaacagcagcaaggaaaggagcatatgttttcatctccaatatgggcattctatgaaatgtaagcactgtatcattactgatccctgaaaaactgggtcataatgagtcttgaacttagaaagtcaaaaattaggttctaaaaaaaagtatgctcctctcaccctatctctatcactgaaaattaaaaagataaatttcaaaagccaaaacacatgacccaaactcttgagcattctgtgagtctaattagatgtgctgttgtcttgatttttgtggaaataaaagcagccatcacagaaagaattgaacggttatattatttgtgaaagtagatttatataaagttagtgattaaggctttgtgacataaagtcatctggtcaatgcattcaaaggcccagtcaatcacccacaagttgaacagatgagacaacaatggcaaagactttcttcaaaagtcaccgctagagggggctctagagacatccaccctggctacccatcagcatcatctggggtgcatgttaaaaacaagatgcctgagagccatcctccaaaattctggttcagtcaccttagggcgtaaccaaggaactggcattttcgtgaagcacccaactcatgcatgtgcagacatccctgagcctgcgaactactcccctatatagctagtcagtctacaaagaggaagctacactggaacacccgccatagagctgtttgcccaaggcctatcttatccggggacagactccttgatggctaaccctgtcctaacacaccctgtccactccatctattttaaattattactgtttttgagtctatcattattaaaggatttaagtttttatattattttagtactttgcatttgaatgatcttttctacagcctctcatctttaaaaagagataaaaatactgcctatgttgtaatctgtaaataagaatgagtgaggtagcccaggtggagttttgcacaggcttgggacataatgtgtgtttaataaatgttggctattacggtgtcattcttgcctgtgacccatcatgtataaggaggaatgaattgtcatcattgcagtggaatacattttggctgcctaggttagataaattgtttaactgtgtgcaatgtccagagattataatttctgctatatggagggctgctgggaaccagagggtatgattgattcgaactttatttcagagactttggttccaagttccaatcctcaaccctcctggccacccacaaagagtcaagaaaatatccaagcatatttccaacatttattggaaacatttattttaaatatatttataatagccaaaaattggaaacaatccaaatgttcatcagcaagagaataaatttcgtatatttatacaatggaatatgacacagaaattaaaaataataaactgctaagaaacacaataacatggataaatcacacagacattgttctcacagctgaacacagtaagccaggttcaaaagactacataatgtatgagggtataattcaggacagtggctacttctgggagatgttaactgggaagaggcaaaaggaactcttctggggagctggaaatgctttatgtcttgtctggttgatgattttagacgtaaaaattaattgagctgtacatttaaaattagtgcactttacaaagtttgctgcatgcattataccttaattaaaaattttttaaagcataagatgcatcttaatgctagtttcaagtgagatttctcacccttttaaactcatctgtgtgtgaacacagcttctcttttacttgcgggtggccccaagtggatggtgggaacaatgcagaataagaaaactttttctcgtcttgtccctcaatttcttattctctcttctctcagtatttctagcttcttttaaagcaccaaatgattattctgtgatcgttaatcagatcgccccactgcctgatttatctgacaaaacagttatttctaaacacctaaactcaatctatccctttccgatgctagcccattactcctcctctccgcaccactgtcctgcatacaagataaatcgctctcagctcagggctgaatgcagtttccatctagaagccaattagggaattgcatttgtttagtctcccaacaacccagatcaatggcagaccctttgatgacttgtgaaataacccaagtaatgggcttgacaatgttgcctcaggaaagattttcagctgaagttgagagaagcagtaaaagtctccttttattcaccaccaagctctatccctcttgactttattcaaaccttgcttcatcttaggcttttctggaagagatattctgggtttcactcttaaaatctgccagctaaaacagagggaaggcccacctgattagctgcctctataatggatttcattaattcgctcacttaatcgttcactaaaaaatcacctatagagcacccgttatgctcagcagacagcagaaaacaaaaccgagtctctgacctcatggaacatatattctagctggagagacataaaataaatgaggtaattttacagaataacaaattacatgagtaaataaaatgagaaagtatgaacaagaatgcccaggaaagtagagacactttatataggactgccagagaagccctctttgaggatgcaacacttgcgcagagacctgaataatgagacacagtcagttatgcacatgctgggaaaatcatcccaagcaaaagaataatcactttcaggggtccaaactctctgtgtgagttctagaaacagagggaaggggaaaccataaagcaaaccctaactttgtcctaccgcctggtctctctacaaggactgcctcctcctttgctattcagcaggggcccttcctagtgccatggcactggctctttctgaaaaaatgccaacgaaaatatcggcaaccaccatgattcattttccaaagtactgttggggtaacccaactcccttgttccaactgaggctgaactgagattcctgaagctctgggagaccaacagcaagactccaattaggcctgaccatgttcaacataaaaagagctgtccctgggaagaaggtgctgatggagacaagctccaaggctgcagcaaagacagcagtgcagatcgataaacacagcacaaattaggatttcattttcaattcttttgtcaagactaattgcatgctcacttcgagtaagatgccctttctgttcagaagcattactgtccaggagaaggtaacacgctggggcttcgaattggcatttcacataatgaggatttcgcagttcaaacaatcactagatattttattctggaaatcgaagctgttagtcaactaaaagtcctcatcctgagctgtgaacatgggcagacattaagcaagcattcggtgacatcactcattccatttctgtcttttcttcccagttctcaggcaccacagatgataacagccactggatccctcaagcacatggaaattcccagaacttcacagatgctcacagatgcatcccatgatcttgacctttgagtaatgggataagcaggtacaaaggagacagaagggccaggctgggtgcttagagaattccaggaagagaaagaggcactagaagtcatggcaggcagcatagagcagtgggtaagtgtacagacctgaggaccagattcgatttccaccgctcaagagccacttggccttacttaagtcacattgtatctctaagtcagcttcctgatctgtgaataagccagacacagaaagaaacatactgcttgatctcacttatattatggaatttcaagaagtcaaactcacagaaacaaagagcagacagtggttaccagggactgaagggtggggaaaatagggagaagttggtcaaatggcataaaccatcagttatgagaataatggtgactatagttaataatattgcatggtctacttgagatttaagagagatcttaagtgtctctccacaaaaaaagtaactaaatggtttacttcacttagcagtctttttggggttcatccgtgttatcacacgtggcaggatttccttcttgtgtggctgaataatattccatcatatataaataccacattccctatatccattcacccattgctagacacttaggttgttgattccataacgtggccatagtgaatgatgctgcaatagccatgggagtgcagatatatctttgatttttttcttttgggtgtatacccagaagtgggattgcagatcatatggtagttctattttttaggaccttccatactgttttccataatagctgtacaaatgtacattcccatgatcagtgcgcaagcgtccccttttctccatgtgcttgccccacatccttcttatcttttgtctttttggtaacagccaactcaccaagtgtgaggtgatatttcattatggtttttgatttgcttttccctgatggttaatgatattgggtaccttttcttgtacttgttggccacttgcatgtcttccttagaaaaatgtctgttgaggtcatttgcccatttttaaatcagatttgtttggttggtagattgctattgagttgtatgtgtttccaacatattttggatattaaccctttatcaaacatatgttttacttttgtctctcagatgaggcatccaggctagctgtgtggcagagcctagctgtgtcagcaggtattgaagcctcagggatgaatgagagaaactggtaaaagaatggagaagaagagatgagagaaacaagccaggacttaattcagagaaattcaacattagaggttcgatttgatatttaatgaatattgcttgtgtgcaaagcttaaatgtcactgtacaaattattttatcacaactatttcatgcatcttgctatttaaactgtccaacattttttggctacaaatatatttaaacatgaatgtctgaatatctgaaatatctagataacttctggcatccacacctttcataatgaccatgaattctcttacactcttccaggaagtagcaaacagatgtgttgctcagtgtgacacaagagaccataggaatgaggctgagaggaaggtctctgcctccatcctgagaggtatcattttcagagggaccccactgaccagatggtgcgatgttcttctctgtctaaatggacaccccaggtatgcagctcagtttgataaaccttgaaacctagtacaggtcagagcctgtggctctcccctcatttactgctcccctcaccaccaagtccctgcctgtctcagatgctcacaccatctggtttctggaggttcctgtaaggaaggccatctgcttcttgttaccatgtcattagaacaattatgacaaaggtgaaacatgaacttgcatgaatcaggcctctctggctcggcttccccatggagaaatatgtactgactttatggtaatttttcatggcaaacctctatctccaagctcctaactctggaaaacagctggaaaataactaagaaacttcaaaaattcaataaatgtcagagttggacctagagcaggagtgacagggagctacatgggatcaaagaggttcgtgttacccattcatagcctagaatgaggcaatcaactaaaaaaaatagaattgcaaatggaagacttttaagtatcaattaggcagggatttgagattaagcatattatctagggctgggcaaggtggctcatgcctgtaatcccagcactttgaggggccaaagcaggaagatcccttgagcccagggttcaagatcagcctgggcaacatagtaagaccccatctctacaataataatattgtagagatagtaaaaccccatctctacagctaataatgataataataataataataataataaattagacaggcatggtggtgcatgcctgtatccaagccactggaaaggctgaggtgggagggtctcttgagcacaggagtttaaggctgcagtgaactgtgattgtgccactgccctccagcctgggcaacagagtgaaactctgtctcagcaaaacaaaacaaaacatttaatgtcattaatcctaaaattcagagaccgccaacactcaaataaagttgggctcacatgcaaagaccaactctccaagaactgggcgtaagatgcatggaggagccaccctccctgcccatctctcctggaaccagcagtttggaatacagaaggggaaatgctagaatagacagctcacctttatttcttacatacttatgatttacaagacttctctgaccattcaagaggcctcagtgccttcattctacattggagtagaataatacgcaaagagatttgcacaaacactttgctagcattgcagcccttactcccccatcaatttagtttgagaccaaatactaaaataccccagcacccagtagcaacctgcttgccagcagagaaagatttgatacaaggtgttttcttttataagagatggttaatcaaatcaggcctgaattatctagatttcatgcattttagcataaaattaattagtttggagaattacgcagtagataaacacaccaaacagctaggcctccttaattgcatgtttacatttttacatccagcttttttcattatcccaaggagctgcctgtagcatgacattcccattaaggaggaggaatccacaaaataatttcatttttctgtctgcagagctcctgataaactgacagtggcttccaagctctccaaatacattttattttcattaaatggctaatctaaaaccaatcaaccaagacatatatagaatgtctgcacagaataagaatgtgtagcttctccagaaagcatgttaaaacaaatccacagcaattattcaggcagacagtacctgataaagggaatctgactgctgcagtagacaccacagcatgggtatagtaatgatggacagactgtaagttgggacctgtctcaccaatatggcggcattagaaacgcaggtgttgtgcttacattgaattactcagtgcaaacagtccacatatggagaagattcacagtcctggaagtatgaatcaaacctcatcacctaacacaggccagctactgctgttcctgaatgaacccaggctaaatctatggaagaaattagtaacgagaagtgagacatcaaactgggtattggtggtgtgaattggtaattggttatatcaacacaaagaccacatgaacaaccacgcttagtgacaagtttccaatgataactgttgtcggccatcatttacaaacggaattagattgttccctttgacgcgcaagtgaaactctttgctgtcaggggctgtgtgctagtgaatggacctagcaccctgacatggcagaagcaagcacagggggcaaagtgaccccatttcccacctaaccgggcagctgtgttctgcttctctcagctgtgcccagtatgagacccagaatttctggaaatgcacttgtatttgtgccaggaatggaggcatttactccatttccaaaatttcttagccctgagtaaaaatacatctacaaagtcaaccccatccacccttttcatgactgtgttaaccaaacaggcacatttatggagcacttattctctctgggagtcagttgtcactgggaagatcacccaagaagaaggacgaaggaagggcctgcctccctcatcacgctgacaggcctacacacctttctacttggcttgagacccagccaacttctttgctcttcctggctgttttcagatacaataaaatcaaaagaaacctcagtggaacaattaactctctggatatatgaaatgccctaggggaagccagattttatatacaagtcttctctgcataggttgcactctcctggattttgtgcttcagtatttggaaggaattatttatgctctgacatgaagctaatgcatgttataaacaaaatctgaatgcacttttcttcctgttgttggtagcctgtgcacctcccaggagcccaggaagcctcttggctgagctaaggacaggcaggcctgtggatgaaacaagtggcacactcactccgtggggtcttcttgtccctgtatcacctgagatgccctggtttgagacatgtgagatgttagctgacttatatgtcagcttttgctgcctaacaaagtggcctcaaacttactggcttaaaagcaacacgcctttattatttctcatgactctgtggtcagctggatggttctggtccagattaggttggctgatctctgcgggacaatctcattggcagtgggtccataacagctggatggtttaggatggcctcacacagacaattggcaggctggaggccagttcccctccttgtggcctcttgtcctcaacagacgagctcaggctcattcacgcagtgacctcagggttctaacagcagcaagagagcgagctgcaatgacaagtgcttctcaagtctctgcttgtgtcattttcggctgatatcctatggccaacaacaagctacgtaatttgtgaccatttttgtgatttaccatagacaattctaagatcacctgcttagaatttaaagagaatcggctaatttaaacatgaaatattaaaactatataagccagacatagaaaagactggcccagtctatgtcttaggctgggtttccccagaagcagactctgagtcaacgacctttgtgcaaatcattttcctgaaaggagaccccagaaagtaactgtagggaagaagggaaatggaggagtagaagggggaaagtatgccggtgatcaggttgttactgcagaaagtggctcagtcccactggggacctctgggaggtgacacagaaagacaccttaaaattctccaacccaggagtccaagagagctgggtatcagtccaccacctcctgtccatcactagttgaggggtgttccagggccatgactccccagaacctctgtccaggctgcacatggcccaagcactgtagtggccagagaaagccctcaggcaggaggtacaggtgagacactgacagcatctgccacagtggaatgacctggacaaggccacctgggcccacacccagcttcggtcattacggtgtgacctctaacaagtttctttatctctctgtgcctgtttcctcataatagtatttatctcataaaattgttaagacaattaaatagatgttattcacttttttaaatatcatgatgtcaacacccaccagggtctgctctcctggaacagacccaggtttctggaaactacttcaggagcccaaaggaaaaaaaatccaaaggtgcttttgctctcagagctgaaagaatttaactcttgattacaggaactgtcaggatttttattaataagtattctgcagtggtgagagacaaatcacagagcataggtaaataagtaggggagaaagcctaaagccaggggaaaacctaaagttagattgcagtggaaatcctcatctcagcacgcctcccacaccaggcaccttagcaaatgctgcatcagagcagagtgctaccagggagaggcagccacctgtgccccatccccagcccatcgtaacttacccagctttaccccttctttccttggtctcctccagaaaagtccttctgggagatggatccattatcacccaagcatctcagcacttcacccgttagcagctgaagccccagaagctctccacatgctgttcagattaacttgggtttgcaggaatttgtttgggatggatgagtctgcaaaacaatcagcatcagtcctgaaattggaagcatgatggactgtgaggaaaacctgtttccagggcttcgctactgaagcctttcctgctttctccccacctcctcagctccctgccggcctttgtagggtcagaaaccctgagcctggcacaccccatggactctctcttttctagcaacagtaatcactaggatttaatgagcactttccttgtgcggacccctgtgctgaatgcccatgtggttgttggcactatggtctcactttacagatgaggactctgaggcacaaccaatcaaagcaggcagaaagtaaagagtcaaacccaggcagacaaaagtcctgttgccacctctgcacgatctgactgcattgcacctttttccatattagtgtgtctgtgcaccttcctcatccccctggctaggctgtaagttgcttcagggcagagtccttggaattcttacgtgtgagggactcagtgaaataatttcattaaattaaatccagcctcttttaccaaatgaaggcatctcttttctgtcatcatttatttcttgcttgagtaaagatagactgtcctgttggtaagcagacctcattgctgggagttctcctatattcttagctgacagccactcctctggctcagaatgattccctcttccatgtgataggccttccagtatgagaagacagcagtcatggcatctcatggtcttttctcctctgtttcagacactctccttctgccatgaaacgcaggtctcctctgccctgggccacttgtctctgaacatcatccctatgaccaatgtgaccttttcaaagctgggtgctcagacctggataagccaaatgtggctgcccagggcataaagtggtgtcttgccaacagctctaccaacatgactggccctcaaaatattttttgtagagtaatagccgaatgtgttgagtaactgggcaaatgacaagcatgacctgaacctcatcattaactttctgagattatgtccttatttgaaaaatggaggtgataatctcagtctttcccacttcaaaggttggcgaagaggaacaaataaaacagcacatatgggaattgcaaaacataattagaagtcatgtgatgtatcaatttaatctcttcactatcacagccaggggaggaccaaacttgccaaccgcttgaggggaaaaagaaggtaggtccattctctagcaacaacaacaaaaaaatctatgattcaatcgagacctaaagacctgacaagcagttggtggaaccaacagggagctcatcctctatgcctacagttgacatcagtcgttttggctgcccattatccttccatccttcttttggtaaaacagtgtctcagcaattttctgggtaaccagccgtccctcactttcacaccaagttaatggaaagggactaactccatgccccagccccaggggtgggctctgattggctttcaccgaatagcatattccaccttcttggtcacagagattggttcgtggatgaacatttccactgacatctcaggccagtaaaaatccagctgaaaacttcttttcaacaattgaaaatagtaaccctctctcttctgctgcatgtgcacaaggaaggctgtagcccctgaagtaccgatagccaccttgagactgaagaaagagcctgccaaagaaatgagcaaacattcctgaaggtgagtcaagaaatagataaagaaagtaaaacctgggtatagtgtttgaagctggatcaagctgtacctgaagtgagacaagccctgtatttttcaattacaggagccaacgaattctctgtaccgttttaccaacttaggtcagattttatgtcacctgatatcaaaaggattcttctgggtaaagtcctctctgtcacttcctacgttttctctgtttccttgtataacttcaagtattataatgcaggaaacagccattcagccatctccaaacagtgagaaagactccatgaacctggtgcaaaccatagagtgccctttctgagaaaatggagatggtagaatctgccttatagagctgttttgaggattaaagaaggtaatgtgtgtaagttgctttgcacattgcacagcacatgttaagtatgcagcctatttttcttttattatccaaaggcactcttctactgtgtccccagcccttcacaaaagcttctaactttaatcacaagagtcatggatgcacaaacacgctaagttacaagtgtaaaatgagaattaaagtcggaccacaaagaagcaacctgcagggaggggccaatgaggaaaggcccctgagcccctgtgagtgtcagtcctggctccttgaagctggtccaatctccataaaggctgccatgcaccatggaacagctgcttttgaggatgtgttagggtttcccagagaagcaaaaccaatacgcacacacaaacacacacactcacttacacacaagtgtaagatgagaattaacatctgaccacacacacacacacacacattaattggctcacaagatcatggagactgggaagtcccatgacatgctgtcacaagcttgggagccaggaaatctggggtgtcattcagtccaagtttgaagacctgagaaccaggggggccgatggtgtaatgtctgagcacagggcaagatgagataagacatcccagctcaacagtgaagcagaaaaataaatgtacttcactaagtccaccaactccaaccccccacagacacaccaaaaataatgtttaaccagacatctaggcatccccagatccagtcagattgacacataaaattatcacaggcagtctttgaaagactcggcaaatttccagaattttggttttaccagcttcaaacagagagagtaaaatcttcctcatcagagtgccctggaatggaggagcctgtgcacccctgggccaagaaactaacacccatctgcccatccttcttttacactagctccaccccaacctaggagatgctccaagtctaaagatgtcttcatcatacttcctccccatcccaagagtcctccttttctccagaggctgcttctggtacccagacagacagtaatagcccctgcatggatgacggacatatcactagatacccccctggcagagtgcatttatagaggtgtctaaccctcctcttaggtacagagagccatatcctttatgcatttgtaaaaatgttcaacatcgtaggtacttaaatgataaattttaaatgtatcttaacatcctcaagtcaccatagtttcagggtctcagcaaattctctatcatcatcatcaataaagccacatgcatcgggtttcccagaactgcttctcagtttccaaaaactgcttttttccagctctgtctgaaaacatctcctttagttttcacttgctttaacctgctatgcaaaaggtatagatttacttaaccaatttacttaaatacttgaccaaatctaacttttactctcctacaaaagatgttcagatttgtcatttcatttacatcttttctgggtccttagaaaatagggtcacattcagtaatgaaatttgttttctctatctatggaaatttgctcctgaagtctgcagccaaaggtgtaggagacagggagaaaaaaaaaaaaaggagaagaaaggaagaaaaagaggagaggaatacagagaaattattttcttgaacactattgtttgatgaaaggtttataaatgcgcataatttttgagactatattttatcagacacactcttacatagtcaattgtaacaatttaaatgttgcttgctttcatggggacaaataataaatttaacaatttaaaaagttatcaagcaagaggataacaatgcagataaggccgggcatggtggctcatgcctgtaatcctaacactttgggaggctgaggcgggtggatcacctgagggcaggagttcaagaccagcctgaccaatgtgatgaaaccccgtctctactaaaagtacaaaaattacccagatgtggtgacagatgtctgtaatcccagctacttgggaggctgaagcaggagaatcgcttgaaccttggaggcagaggttgcagtgagccgagatggcaccattgcactccagccttggcgacagagcgagactccgtctcaaataaataaataaataacgaagataaaagaacatattctggaatgtcattatccagtgacttcaatctcagaaatttcaccgttaggcaaattgagtagcagatttttaggtcttaatggaaaaaaaaagagaaaaaatttgctacttttgggggactatgcttctacccgtccatgcactacttaccttccaagacctgaaatttagacccacatgaccaacccaatggtccacacttgccttgagctcaaggttctcctggtgaaagaaacttcttatagaaatatgtaattgaggtaaagcaaagaagccttactctttacagggactggttctcagctcttgaaagcaaatgtccaagggcctccccatttccaagctggggttggcagggacaggcccacagccagtgcagcctgatgagcccactctatagcaccagccacctggaaactccccacagaggattcactttccaacctcattgtacagtgaagacatctgtgcactcagagcatctgaaggcaagcctgataagcatttgtggattttgtgggtttttttgggcttttttgtttgtttgtttgtttgtttgtttgttgtgagacagagttttgcttttgttgcccaggctggggtgcaatggcatgatctcagctcaccacaacctccacctcccgagttcaagcgattcttcggcctcagcctcccgagtagctgggattacaggcatgcaccaccacacccagctaactttgtatttttagtagagacggggtttctccatgttggtcaggctggtgtcgaactcccgaccttaggtgatccgcccgcctcagcctcccaaagtgctgggattacaggcgtgagccaccatgctcagcctgcattttgttttttaacgaaaagttttggattgtttgtgttttgttttttaagcaactcaggatgagaaagttccaactctattttaagcctttaaatacctcttaactaaagaatgaagtaaatggaaaccacaggcacctgttaacagcccaacgatcagctattttgtattacccgaagccagaaacagcaggcagatggggaaaccaaggtgtacagcaaggtgcagggaattgtttaggttcccaaaattgtggctggcatcagcaggattggaatctaggtccacgacttctaccctgagagacaagagcaggcaggcagtgtggcaccatgaagagagctggattctaaagaggcagtcagtaaaaatccagcacagggcagccaatgtcaccagaaatgcaatctcctctttagaagaggcacgagctccctgctgtcacagagagcattttccatccaataagcagttatggagctgcatttattcccttgtggaaacacataaggaagaacatcctattgtgagcttacagatgccaggacccaagccaactttatgaacaatgacagctcatggcatgtgaatattggtgcatgttccaggaaggagacaaatgctatggtttctctggaaaaagaaaacatggcagcattccacagagaaaaaacaataatgacaaataccctgtccaaagtattacagttatggtcatttcaatggcatagtattgacattgaaatcaataaaagaaatcagttgaatacaattaggaatccagaaacagacctgtgtggaatttagagtgtgacaaacatgacattttgaattggtggcaagaaagagtaaattcacatgacaatattctatccactttggaaaagttaaattagatcaattagattatatacccaacaccatgaacaaaaatattctctggatggcttaatgaactaaatgcacaaaaaccatataagtaatagaagaaactattttttaaatattttgtaatcatttatgttggtgtagggaaaggcatggcatgaaagccagaagccataataggacaaaacagagtgtttatttacactttttaatcttgcatatagcaagtatattaatagaagtcagctttttttttttttttttttttttttttttgagaaggagtctcactctttcgcccaggctggagtgcagtggcgcaatctcggctcactgcaagctccacctcccgggttcatgccattctcctgcctcagccttccgagtagctgggactacaggtgcccgccaccatgcctggctaattttttgtatttttagtagagacggggtttcaccgtgttagccaggatgatcttgatctcctgacctcccccacctcggcctcccaaagtgctggcattacaggcgtgagccactgctcccagctgaagtcagctcttactattggtattaaattctgaaaacaagtctgtttggaacaggctcactgatatccaatagctgctgttactgatgaaggatctgaggcttggagagactggtgtctcagccagggcatttcaggagaaggcaggcaggcaggaaagaacccaggctctgctccctcactcctccactcctcttggtcaaaataactctgaagttagggttaaatagtagggatgaaggctcgtgtttcactctgtacttttcaaagcagtttctctcccattacctcacttggtcagcagaacagcctgtgcaatgggagagcagggtagcttcgatcatctccatttctcagacaaagaaattgaggtatgacagtgagtggctggccctggtcacaagctcctggagcaggggtgtggctggactccacagccctctgttcctggtcagaagtgttcttctttccatcctgctgtctcttgggatgctcgccaatgttttggtgccttcagcagtgaacagcaaaatgcttaccgttcccagacatttcaaagtaaacttgtccatctgacaggagaataagaatcaaagcctccttggaggaaatccagatggcaagcttcttacctccacctttcagctctccacttaattctgtggatggtgctgccaataagccaggcttcatttaactgtcaaaaggacaatgtttcagcagcgttcctgggaataggtgggagggaggagagggctctgggccgtgggtgggagcaaaaagaatgcaggaccccacatccgtgctcactgttcatctgcatctcaacccgtttcattccctggtattttctcttcctgtattcattcctgccatgatgcatgcatacattctaacaggcataaatgtaacaacccagtcaactgtgtatatagattccccgtgagggtacaggcagctcggcttagtttgtgatcatttttatttcattgaaagcctcagagtgtcatcaggtactgttaatttaactgctctatggaatagacccagtttattggagataatggggagagacagtctcagaaaattcaacactgcagagggccctttcctctggagtaatgatcggacacagtgtcaggacgtggcctcctataatgcaccgcaatcgcaatgtaatgatgccttatgaactttaaagttatttccttccgtggagcctgcccttggtgctttctgaaggtgcttgatcatgagagagaagagtgattcactaccggcttttgtaaaacttgtgagatggctgagccagagccctctggccacagagctagaaaggccaggcccaaggtggggctacacagaggccaccaactcaagtcccaggtcatacaggttgctgtcagaccccaatctgccactgatgttggtcaagtgtcataactgtgctgagacaattcacttgcaaatagggacaaatcaaagtaactacctccttgagttgtgggaggattgagtaagaaagtgcttatggcacataagaagtattcagtaagtattgagcattacattatcaatatttactctctatttttttaaataatttcaacttctattttagatttagggcttacatatgcagatttattacaaactatgcatccaacaatggtctaatatccaggctctatcaggaacttaactccacaagcaaaaaccaaataaccccaataaaaagtaggcaaaggacatgaacagatatttctcaaaaagaagacatgcaagtggccaagaaacatttaaaaatgctcaacatcactaatcatcagataaatgcaaatcaaaaccacaatgagataccatctcataccaatcagaggtctattattaaaaagtcatacaataacagaagccagcaaggctgtggagcaaaaggattgcttatgcattgttggtaaaaatgtaaattatttcagtccctgcgaaaaacaatttggagatttctcgaagaatataaaacagaaataccatttgacccagcaatctcattactaggtatatgccaaaggacaataaatcattttactttctatgttttagactgcaaatgtcagcatacttgactggttaaaaagaaaagacagttaattcacatgccatattcttcctccatggtgaaaccatggctaatgcatttcaccttacaagtttttatggaaagagacatacatctgaacatttgtacaatattttttttcacttaaccagacagcgcaatgaaatatttgagaatgtttcatgctaactgttcataaatcagatccgcacactttttttgtgattttacttcactgtttttgccttgtctgtgcaatgcacatcacactcggggccattgttcccctgcctcttttgcaggtttacatgtggcctggaacatcttccatgggttcctcaagagctctccctcctctcctccctgctttgatgtgctgtaggctcccagccttctgcttctccagccaaagaacaccgctaagaaggaaactgtggccctgtaggagcccttgactccttcaccgaggctgatgcatccctcattaggggccctgctcctattcaaggagatcttccctacatctttcttcttccaagtttctatccactgctgtccccttctcccttaggctctgagggtgataggcacatagccatagcaagactcaacaaaaagaacaaatctggtagcatcacattaccctacgtcaaactatactacaaggttatagtcaccaaaacagcatggtaccggcagaaagcaaaaaaaaatgcccttgaaatttttattttttctgtggttttgttttattatataagcatgagcaaaattataatcaacttatgtaatttagaaatgttcaaggggtcttttagttctatcattttatgaattattatttaatatcttggtctcactattttaaaaaaatgccatatgtatacagttttaaaaacctatataattggccaggcaaggtggctcatgcctgtaatcccagcactttgagcggccaaggcaggtggatcacctgaggtcaggagttcaagaccagctcggtcaacatggcaaaaccccgtctctattaaaaacaaaaaattggccaggcatggtggcaggcacctgtaatcccagctactcaggaggctgaggcagggagaattgcttgaacctatgaggtggaggttgcagtgagtcaagatcacgccattgcactccagcctgggcgacagagcgagactccatctcaaaaaaaaaaaaaaatctatataatgaatcatcataaaagaaatgaaaaatacagctgaacaagaagaaaattaaatcactcacaatcatgccacgtatgtatgatgtctttgaaatcaaactgtctatactcacaaactcatatttccttttcatttattttaaaaaattgtaaaaaacattttgtgggtacatttaggtgcatatacttatggagcacaagaaatgttttgacacagacatgcaaagcaaaataattacatcatggagaatggggtatctatcccctcaatcatttgtttttgtgtgtgtgttacaaggaatccaattatagtctgttatttttaaatgtacaattagattatcactgactatagtcaccctgttgtactattaaataatagatctcactcctataattttcatccctacttctcctccaaaattgttgttctcaagcttgccactgattttcactctaataaaggtagacacaattacttagatctcattttatttaacctgtcagcaatgtgtgacccagctgaaaaccctctcctccataatactttcttcacttggctctcagggtctcctggtttttcctcctgctatcccatccatgtaccatcatctattttgcttgcttcttcttgtccccaacctgtcacacattgaagtgttgcaggacccaggccaggatctttctcatgactttcagcaccttgtacatgctaatgacttcccaacgtgtatttccagtccaggtttctttcttgagttccagacatctatatcaaactgcctacttgatacctctttttacttagctgctgggtattgcaatgttatcaggtccaaaattgggctgctgatgttttttgttttgtttttgtttgtgtgtttgtttgttttgtttttgttgtttctgtttgtttttgtttttgttttttgtttgttttgtgtttgttttgtgtttgtttttgtttgttttttgtttggttggttgttttttgtttgttttgtttgtgtgttcgtttttttgtgtgttttttgttttgtttgttttttgtttgtttgtttttgagacggagtctcaccctgtcacccaggctggagtgcagtggcgcgatcttggctcactgcaagctccgcttcccggttcacgccattcttctgtctcagcctccagagtagctgggactacagattcccaccaccacgcccgactaatttttgtatttttaagtagagacagggtttcaccatgttagccaggatggtcttagtctcctgacctcgtgatctgcctgcctcagcctcccaaagtcctgggattacaggcgtgagctatcgcacctggccaatgtttttttttatacctactgctcatgtagtcttcttgcattcatggtaactctcccagcagctctgcctaaagccttcaggtcatccttgacttctttctctctgacacctcacacctaattcatcagccaatagggttaggtctaccttcaaaatacaaccagaagccagtcagatcttccaggtcccagccaccaccatctgttgcctagatgagtgatgagtgactagactgctaattggtcttgtttatttttaatcctcttcccatttattcttaaaagagggtcctattaaaacatgccagattgtgtcattcctctgctcaaaacctttttattattattatactttaagttctaaggtacaggtgcacagcgtgcaggtttgttacataggtgtacatgtgccatgttggtttgctgcacccatcaactcatcatttacattaggtatttctcctaatgctattcctcccccagtgacccaccccctgacaggccccggtgtgtgatgttccctgtcctgtgtccatgtgttcttgttgttcaactccatcgattcccatttcaaatttctttctaatacccaaaaggcagcacatgctctaacctgttttctctttgacttaaacgtctactgttccgttccttttgctctaatccagccacactgagcttcttggaaactttaaagcatgctcagcatgtttccctttgtacctggcagctcactctgtacggagggcttttcccgcagatctgctctcagctcgctgcctccatttcttcagttcttcgatggaaagtcactttctcagcaaggccatatctggccattctaatatttccaccatctctctcctccaacacacatttcattttcctgctttaatttttctcctttaacatatacattttgtttatgctgtttattgttattgtatgttcacttcattctcatgatcaggattttgtctgttcattaccatatccttagtgcaactcaatacatatttattaaataagtgaatagagtttaccgtggtatattattttaaacataaattctcacttaaggaacagtatgacatgggctaattctgacaattttacttggcattatgcacatttgtgggattattttagttatttttaatactctattttctctatatttatattcttccatttaggaaggaaagtccaatattgcggttaatattttttcttttactggttgttatgatagttttaattatggtaaaatgagtcgaaggagttgcaaacttcatttgtattttattagaaataataaaatataagggtgatgaatgcaataaatgtaaaatttgttttcaaaagattatgagccttcaatatctgatataaaaagacacagtttgaatttcttgcttttcatagtaagaaagctattcttgtcaggcacagtctcttctggttaagcagctgctgatgttatacagatttgggggaagagtggaattaaaagcttggccagctctcacaggcgtcagtgggttgatgccacctgcctggtgcagcgtaattatctgagggagactgctatggaatggttggcattcccaggcatgctgattaaggtgagtttgtctctgactggctatctttcagatgcaagcagctgacattgattggttagggaaagagtctagtggtcactgattatgtgtctggatttaaaacgacttctgtgtggctgcttgttattggggctacagatcagactttccttaagtttgaggcaactttcatcagatgttttctgtttcaaagttgccttccatcaactaggttcaaaacaaaaattttttatattccagaaatgtagatgtatttttgaagtttggattaaagaggaattatttaataaccgctctcaaaaagattcccccctcaccttctttaagacacttattctcaattgagagagttatctatatagttatttttcgataaataattattagttttacatgtgtgtgcgtgtgtgtgtgtgtgtgtgtgtgtgtgtgtgtgtgttttaggggctgaggctgaactcctaacatcataatctccagtagaaagttttagtctccttgcaaattaatgtaggttatataatagtgatacaattatgcatgtgtttattttataaaaatataattacaatttttttccaaaaatctacatttttatattaggatcagatacagggctaaaactgtacaaaggcttcaaaattactttattttcaaataatcataagtaatcagaatagtgctatttttgaactacacataatgacatataaatatttttaaagttctccccacactgtatatttcattttttcctttcaggttatatgttttagcttatttttaagaacttgatttaaataaaacattattatattttaaaacaaaacaaaaaacataacaaaaatccaattaggactctcacgcctgtgagtccttgcttgtgggcagtgagctccagcctttgagcgtggtattcaagtttagggtagcattcgtcttgcagtatttgctttcatgtgttttacagttttttgagttcctaggaaactcctagatgcctcgtgcctaacctttgtgctcacattctattctctatgtagaatggttttctcacgcttttttttttggcatcctaactcttacgtatcacattgtatcataattgtatatttacctgtttttaaagcagataatattcattttcttgtatatcgttggaactacatatatatatatatatatatatatatatatatatatatatatatatatatagttcataacaggttttagaatagtaagttaattgaaattgggaacattttgaattttacaaaaaaaagtttttaaaattctttgtcatagagttatttttaaaagattgcctttttaatggatttttttttaagaatactgatacttctttgcatgtgaatgaggtagagaaacatgaaaataaaaactgtacctcaaaacaccctgggattaaacaaatgtttgagaaggccaacttactcactggtggtctgctacaagtgaatgatgacagcagtttaagtaaaataattgaagatgaaggaaggtaaaacttgcaagcttatttccctgtgaaagaatgttagcaatagttactttctctggaaatagaatagtttagtcagccaaggctggaggatcctcaactgtatcaaagctgctgaaagattaaaaattctaatgtaattgaacatgaaaatgatgacctacatgttaaactatcatacatagattattaaaacttataataaacatacaaacacttatgtatgtcaataaatgtgatacattacatcaacagaatttttaaaaatatatatatatataaccatctcaatagatgcagaaaaagcatttgacaaaatctggcattctttatgataaaattgtcttatttcatttaagtttccttcatgtcttttaatggcttgagagctcatttatttttagcactaatattccattgtatggctgtagcacatgttattccttcacctactggaagattagcttcgttgcttcacaaattgattgaatttttatatctatgcttatgagaatttttttgtttaaaatatctttgtctgcttttggttcgtggtgatgctagcattatagaagtttgaatatactcctttttattttgaagggcaaagtttgtgtagaattttattattttttcctacaatgtttggaaggattcaccagcctagctgattgggcctgaaattttatctgtaaaaaggttttcaactgttattttattttattttatggatatgggggaatgtaggttatctattcttgatttatgtttggtaatttaacctttttcaaggaatttttcaattttacctaacttgtcatgtttattcacataaatttaacaatattaccttttttatagtatctgtagaatctgtaataatgtcacattactcaattctaagttactaatttgtatcttctttttttcctgagtaacctagttagacaaaggtttattgcttttattgatctcctcaaagtgtgtagtgttgacttcctctactgtttttcttctctattaatttcatctttgatgatttggtcctttaggctcattattttaaaaaaatcatagcctgagtagcttattaacaaaatgaattgatttcttatggttctggaagttgcaaagtccaagatcaaggtgctgttagatttgatgtctgatgagggactagttcatggttcatagatgcattattttttcctgtgtcctcaaaaggcaaaaggggtgaaggggctttctggggtctcacatgtaagggcattaatttattcataagaacttggcctccattacctaatcacttccaaaaagccccacctctaataacatcagctctgtgatttggttttagtatataaattttgaaaggatccaacattcagatcaccagagatatttatttatttttgtctgcatgctttaagtttagttttatctcctttttactggtttcttaaagtagaagtgaaagttatttgtttgagactcttctaatatagacattcagtgctatatttgtatttaagtatagttgtagctgtattccacaagttttgatatattatgttttcatttttacttagtgcaaaatattttctaatttattttcccttacctctttgactcaggatgggtatttgggtatgtattacttagtttccaaatatttgagtatttcctagagctatttttgttactgatttctgatttgattgatatgcttgtcagggcacatactttgtatgacttatccttttgacttaatcctttttttgagagtaattgtatggcctagagtatgatctatcttggtaagtgttccacaggtacttgaaaagcacagtgttgctcaagactattctattcttgttgattttctgtctccttgttcagtcacttattgactacagggtattaaaacctcaggttactttaaaattgtctgtctgtagttctagatatttatgtctcatatattttgaagctgttatgttaataggggcataaacattttggattatgtcttcttgattgattgaatgctttgtcattgtgacatgatcttgtttattgatgggaatattttttgctatgaaatgtgctttggtattaaggcagccacacctgctcagccttcttctaagtgttagcattctcttttttcaaccttttatccaatttgtgtcttcaaatttaaagcgcatttcttattggcagcatctggttgggtcctgttttgttttgtttttttttaatggagtctgacagtctatattttaactgaggttcttagaccagtgtcatgtgtgatgtaattattgacatacttaggcttacctgtcatcatgctgtttgattactattagccccagctgttctttattccctttttcttttctgctctcttaaagattagtcaagtaacttttcttaatgatttagttttacatttctgttatggcatattaggtataactcttttttatttttatttttgctttcttagtatttgttttagaatttacataattttaacttatcgaagtccaccttcaagtaatattatacaacatcatacatggtataggaaaagtataatagtatagtttcatttcttttctcctagcatatgtacatgtgctcagcaatttttttagatttcagtgtaaagatctttcaaataatttgttcaatttatccctaagtattttatatttttaattctattgtaaatagtattatatttaaaaatttattcctaattatttctaacatgtgaaaataccattgatttgtgcatatttatcttatatcctacaacattgcaaaactaacttactatcttcagtagtaggcttttaaaggatttaattgggatttctacataaatgattatatctgtgattaaagacatttttacttacttcttttctatttagatgccttttatttcccccctttcttgttttccttccttctttctcttctcttttcttttttttaagtttttttgcaataggtagaccttccaggacaatgttgaatagaagtggtaagacctgatatccctgtcttcttgattgtaagagaaagcattcagtctttcatcattatataggatgttagttgtaggtattttaaagatgccctttgaaatgttgagaaaaatcttatgtatcctttatttgatgagattattttttaataagaatggatattaaattttgtcaaatgctctttctgcatatactacacataagtgtatgcttttcctttcattttattaatatagtaataacattaattgattttgaaagagggttaaatattcaacttattaaaataagtgtttaaatgcattttttatttccttaaaaatgtttaaatttgggggaggagccgagatgtccgaataggaaaagctccggtctacagcacccagcatgagcgatgcagaagatgggtgatttctgcatttccatctgaggtaccgggttcatctcactagggagtgccagacagtgggcgcgggtcagtgggtgagcacaccgtgtgtgagccgaagcagggcgaggcattgcctcactcgggaagctcaaggggtcagggagttccctttcctagtcaaagaaaggggtgacagagggcacctggaaaatcgggtcactcccacccgaatactgcgcttttccgacgagcttaaaagagggcgcacccggagattatatcccgcacctggctcggagggacctacgcccacagagtctcgctgattgctagcacagcagtctgagatcaaactgcaaggtggcagcgaggctgggggaggggcgcccaccattgcccaggcttgcttaggtaaacaaagcagccaggaagctcgaactgggtggagcccaccacagctcaaggaggccttcctgcctctgtaggctccacctctgggggcagggcacagacaaacaaaaagacagcagtaacctctgcagacttaaatgtccctgtctgacagctttggagagagcagtggttctcctagcatgcagctggagatctgagaatgggcagactgcctcctcaagtggctccctgacccctgacccctgagcagcctaactgggaggcaccccccagcaggggcagactgacacctcacatggctgggtacgccaacagacctgcaactgagactcctgtctgttagaaggaaaactaacaaacagaaaggacatccacaccaaaaacccatctgtacatcaccatcatcaaagaccaaaagtagataaaaccacaaagatggggaaaaaacagagcagaaaaactggaaactctaaaaagcagagcacttctccccctccaaaggaacacagttcctcaccagcaacggaacaaagctggacggagaatgactttaacgagctgagagaagaaggcttcagatgatcaaattactctgagctatgggaggaaattcaaaccaaaggcaaagaagttgaaaactttgacaaaaatttagaagaatgtacaactagaataaccaatacagagaagtgcttaaaggagctgatggagctgaaaaccaaggctcgagaactacatgaagaatgcggaagcctcaggagccgatgcgattaactggaagtaagggtatcagggatggaagatgaagtgaatgaaatgaagcgagaagggaagtttagagaaaaaagaataaaaagaaacgagcaaagcctccaagaaatatgggactatgtgaaaagaccaaatctacgtctgattggtgtacctgaaagtgacggggagaatggaaccaagctggaaaacactctgcaggatattatccaggagaacttccccaatctggcaaggcaggccaacattcagattcaggaaatacagagaatgccacaaagatactcctggagaagagcaactccaagacacataattgtcagattcaccaaagttgaaatgaaggaaaaaatgttaagggcagccagagagaaaggtcgggttacccacaaagggaagcccatcagactaacagtggatctctcggcagaaactctacaagccagaagagagtgggggccaatattcaacattcttaaagaaaagaattttcaacccagaatttcatatccagccaaactaagcttcataagtgaaggagaaataaaatactttatagacaagcaaatgctgagagattttgtcaccaccaggcctgccctaaaagagctcctgaaggaagcgctaaacatggaaaagaacaaccggtatcagccactgcaaaatcatgccaaaatgtaaagaccatagagactaggaagaaactgcatcaactaacgagcaaaatagccagctaacatcataatgacaggatcaaattcacacataacaatattaactttaaatgtaaatggactaaatgctccaattaaaagacacagactggcaaattggataaagagtcaagatccatcagtgtgctgtattcaggaaacccatcacacatgcagagacacacataggctcaaaataaaaggatggaggaagatctaccaagcaaatggaaaacaaaaaaaggcaggggttgcaatcctagtctctgataaaacagactttaaaccaacaaagatcaaaagagacaaagaaggccattacataatggtaaagggatcaatttaacaagaagagctaactctcctaaatatatacgcagccaatacaggagcacctggattcataaagcaagtcctgagtgacctacaaagagacttagactcccacgcattaataatgggagattttaacaccccactgtcaacattagaaagatcaatgagacagaaagtcaacaaggatacccaggaattgaactcagctctgcaccaagtggacctaatagacatctacagaaacctccaccccaaatcaacagattatacatttttttcagcatcacaccacacctattccaaaattgaccacatacttggaagtaaagctctcctcagcaaatgtaaaagaacagaaattataacaaactatctctcaggccacagtgcaatcaaactagaactcaggattaagaatctcactcaaaaccactcaactacatggaaactgaacaacctgctcctgaatgactactgggtacataatgaaatgaaggcagaaataaagatgttctttgaaaccaacgagaacaaagatacaaaccagaatttctgggttgcattcaagcagtgtgtagagggaaatttatagcactaaatgcccacaagagaaagcaggaaagatccaaaattgacaccctaacatcacaatttaaataactagaaaagcaagagcaaacacattcaaaagctagcagaaggcaagaaataactaaaatcagagttgaactgaaggaaatagagacacaaaaaaccctacaaaaaattaatgaatccaggagctggttttttgaaaggatcaacaaaattgatagaccactagcaagactaataaagaaaaaaagagagaagaatcaaatagatgcaataagaaatgataaaggggatatcaccaccaatcccacagaaatgcaaactaccatcagagaatactacaaacacctctacgcaaataaactagaaaatctagaagaaatggataaattcctcgacacatacactctcctaagactaaactaggaagaagttgaatctctgaatagaccaataacaggagctgaaattgtggcaataatcaatagcttaccaaccaaaaagagtccaggaccaggtggattcacagccgaattctaccagaggtacaaggaggaactggtaccattccttctgaaactattccaatcaatagaaaaagagggaatcctccctaactcattttatgaggccagcatcatcctgataccaaagccgggcagagacacaaccaaaaatagaattttagaccaatatccttgatgaacattgatgcaaaaatcctcaataaaatactggcaaactgaatccagcagcacatcaaaaagcttatccaccatgatcaagtgggcttcatccctgggatgcaaggctggttcaatatacacaaatcaataaatgtaatccagcatataaacagaaccaaagacgaaaaccacatgattatctcaatagatgcagaaaaggcctttgacaaaattcaacaacccttcatgctaaaaactctcaataaattaggtattgatgggacgtatctcaaaataagagctatctatgacaaacccacagtcaatatcatactgaatgggcaaaaactggaagcattccctttgaaaattggcacgagacagggatgccctctctcaccactcctattcaacatagtgttggaagttctggccagggcaattaggcaggagaaggaaataaagtgtattaaattaggaaaagaggaagtcaaattgccctgtttgcagacgacatgattgtatatctagaaaaccccattgtctcagcccaaaatctccttaagctgataagcaacttcagcaaagcctcaggatacaaaatcaatgtacaaaaatcacaagcatgcttatacaccaacaataaacaaacagagaaccaaatcatgagtgaactcccattcacaattgcttcaaagagaataaaatacctaggaatccaacttacaagggacatgaaggacctcttcaaggacagctacaaaccactgctcaaggaaataaaagaggatacaaacaaatggaagaacattccatgctcatgggtaggaagaatcattatcgtgaaaatggccatactgcccaaggtaatttacagattcaatgccatccccatcaagctaccaatgactttcttcacagaattggaaaaaactactttaaagttcatatggaaccaaaaaagagcccgcatcgccaagtcaatcctaagccaaaagaacaaagctggaggcatcaggctacctgacttgaaactatactacaaggctacagtaaccaaaacagcagggtactggtaccaaaacagagacatagatcaatggaacagaacagagccctcagaaataacgccacatatctacaactccctgatctttgacaaacctgagaaaaacacgcaatggggaaaggattccctatttaataaatggtgctaggaaaactggctagccatatgtagaaagctgaaactggatcccttccttacaccttatacaaaaattaattcaagatggattaaagacttaaacattagacctaaaaccataaaaaccctggagaaaacctaggccttaccattcaggacataggcatgggcaaggacttcatgtctaaaacaccaaaagcaatggcaaccaaagccaaaattgacaaatgggatctaattaaactgaagagcttctgcacagcaaaagaaactaccatcagagtgaatgggcaacctacaaaatgggagaaaattttcacaacctactcatctgacaaagggctaatatccagaatctacaataaactccaacaaatttacaagaaaaaaacaaacaaccccatcaaaaagtgggtgaaggacatgaacagacacttctcaaaagaagacatttatgcagccaaaaaacacatgaaaaaatgctcaccatcactggccatcagagaaatgcaaatcaaaaccacaatgagataccgtctcacaccagttagaatggcaatcattaaaaagtcaggaaagaagaggtgctggagaggatgtggagaaataggaacacttttacactgttggtgggactgtaaactagttcaaccattgtggaagtcagtcagtgtggcgattcctcagggatctagaactagaaataccatttgacccagccatcccattactgggtagatacccaaaggactataaatcatgctgctataaagacacatgcacacgtatgtttattgaggcactattcacaatagcaaagacttggaaccaacccaaatgtccaacaatgatagactgaattaagaaaatgtggcacatatacaccatggaatactatgcagccataagaaatgatgagttcatgtcttttgtagagacatggatgaaattggagatcatcattctcagtaaactatcacaagaacaaaaaaccaaacaccgcatattctcactcataggtgggaattgaacaatgagaacacatagacacaggaaggggaacttcacactctggggactgttgtggagtaggggaggggggagggatagcactgggagatatacctaatgctagatgacgagttagtgggtgcagtgcaccagcatggcacatgtatacatatgtaactaacctgcacactgtgcacatgtaccctaaaacttaaagtataataataataaatttttaaaaaatgtttaaatttgagtttaactttaaatcttatattctgttaaaaattttccaagttttatcaattctttttaacattctaaaatatatatgacataaactttaacattttaacaatttttaagtgcacagtttagtttcatcaagtgcatttacaatgtaatgcaacagttactactatccatttctagaacgcttttattatcccaaacagaaactctgtacccattagatattaacttcctgtaagttctaccccagcccatggaaccctctattctaatctctttctctgtaactttacctattccaggtacctcatttaagtggaatcatacaacatttttttgtctgtgtgtctatttcacttagtataatgttttcaaagttcatttatattgtttcaagtatcattacattatttctttttattcccaggtaatattctacctcataaatatcatatttaatgtatcagataatagacatgtggattgtttctaggttttaactattatgaataatgctgctacgaatgtgcacataggcatatgtctctcttgagaaaatactggggagtggaatttctgggtcacatgataactgcatttaatcttgagggactggggaccatcaagttgtttcccaaatcagctgcacaattttacattatcaccagcaatgtaggagggctcccattttttcagatactttccagtctttatttttaatctttttgactgtatgtatcctagtgatgtgaagtgctatctcattgtagctttgacttgcctttctctaatgatgaatgatgttgagcatcttttcatgtggttaatggccatttgtcaatcttattttataaaatatgtagtcagatcctttgagcatattttaattgattgggtttttgttgttgaattgtaagaatgctttatatattctgaacaaaatgtatattactgttttctcataaactttgttctaactcttaatgtcctttgtttctgtattttgaacttttgtttcataaaccacttttttctcaagaatttgccaatagcaccacaatatttctttatgtccatctttttttataatttacttcctcacccaaaaggaaaaaatctatatgcatttttattattcgcccaaaattcccaccccactcacatccactgtattgctataacctacattctctcctggaacaagatatggggaagattaaactttatcttgctgaggtaacctcctttatattatgcatgcattgctttcatgaagttttccacagttgggaaaaccaggcacgttgctgctttgctcaggagcgcaggcttacatgccttgaaaggatgtagtaaaccaacagatggtctaagttactaacaactatcatctcattaattgtcagggttacttataaataaagaaataatttagaacttaaatgtcaaaatattctactacaaagatggcaaatatttgatgaaacctgcaatgtttgttccagatggccaaactataatctagtccctgcctttctcattcaattttttatttttgattttttttacatctttatttgacaaatacatatttccttgttatactatgcttccaggtgacactctgatatatatctcaaatgaccatacacagaattgtgaaagtagttgaggacactcatatcacaaatgaggaaagtcagatcacctcagcagttggctctggaaataggaggaaagagaactatcatcttcctttcatactgagattcaccaattattcaatgtacacaatagaaaccacaaatcaacattagttatttaatacaaaaacactcagtataaagccattgtgagggaaatcatcttttcgaaagtcaattattctagggggaatcttcagcaagaactacataaatcaaaagaagttgacgctgagagaaactcgctttgcccctcatcacattactatctactcgttgacaagaactttaatcttctcacaagtattaagtaaaaacagtgctaactcttcttcatgaactggtttattcccagagctaagacaaggtgtaacttatttggtgtaagggaaacctcacatccattggtccatgtttttgtcagtaaggttaataggtcatcaatgagtatatctagtctccttttctcctctggactctgcagagaagtgtagggcaggtgaagacccttcctgcattggctgggtaaatgttctgtagatgaacatttcttttgttcaggttccaaaatcaagacaaagagaaaacataagaaaatcttttttgtcaaggcaaaaagccctattttctaaatgagcttttaacaggaataacatctttgaatattgatctgacctcttggttttatttctaaattggtttagaactaaaaggggagaggtgtgttatcaatttatacatgaaaagccccaacatccaagaatccatcttaatgtgatctagatatctgagaagcagacataaaatgtatagccctgtttaatggtgattgatacatttccaactgtgttgctgtccataagcaaagtctatgtgcatgtggctggttcatacatttctgtcatagacaccaaggatgccagacaggaccaggcagaagatacaacaggcaatggttttcttttctttttctttcttttttttttttttttgttcacttaaaaatgtccttaatggagcattaaaaataataattttattacttgaaagaccaactgacaaactatggttattcatacttgggtatatgtcataggttttttcaaaaaatcaatgaaaagagcctgtccctccaagtaaaacaactcacggcattctctgccgatgattaaactcacgctttcgagcaaaaaataaaatcttggaaaatttgtatctgccttcacgagcttaatatactaatacttacagatttttctggtgagactgattactcgtgatactaagtaatgtgattttttttaatttttattttattttaagttctgggatatatgtgctgaatacgcaagtttgttatataggtataaatgtgctgtggtggtttcctgcacctatcaaccgtcatctaggttttaagccccgcatgcattaggtatttgtcctaatgctctccctccccttgcccctcaccccccgacaggccccggtgtgtgagatccccctccctgtgtttatgtgttctcattgttcaactctttcttatgagtgagaacatgtggcgtttggttttctgttcctgtgttagtttgctaaggatcatggtttccagcttcatccatgtccctgcaaaggacacgaactcattcacttttatggctgcatagtattccatggtgtatatgtgccacattttctttctccagtctatcattgatggggatttgggttaattccaagtctttgctattgtaaatagtgctacaataaacatacatgttcacgtgtctttatagtagaacgattgataatcctttgggtatatagccagtaatgggattgctgggtcaaatggtatttctggttctagatccttgaggaattgccacactgtcttccataatggttgaactaatttacactcccaccaacagtgtaaaagcattcctattccaccacatccttaccagcatctgttgtttccagacttttaatgctcggcattctaactagcatgagatgatatctcattgtgattttgacttgcatttctctaatgacgagtgatgatgagctttttttcatatgtttgttggccgcataaaatgtcttctttcgggaagtgtctcttcatattcttcacccatttttcgatgaggttgttttattcttgtaaatttgtttaagttccttgtagattctggatattagacttttgtcagatgggtagcttgcaaaaattttctcccgttctctaggttgcctgttcactctgaggatattttcttttccttttttttttttttttttttttttttgagatgagttgcgctctgtcgcccaggctggagtgcagtggcgcgatctcggctcactgcaagctctgtctcccgggttcacgccattctcctgcctcagcctcccgagtagctgggactacaggcgccaaccaccatgcccggctaatttttgtctattttttagtagagacggggtttcacggtgttagccaggatggtcttgatctcctcacctcgtgattcgcccacctcagcctcccaaagtgctgggattacaggtgtgagccactgagcatagctcagcagaagctctttagtttaattagatcccatttgtcaattttggcttttgttgcaattgcttttattcattaagtgtttacctatgcctatgcctatgtcctgaatgttattgacaacagaaaatgattttcacattctgcaggcaagaaggtggacctacgtcttggctgggctgctacttgtaattgtgaagtgccagaaagcaattaccagcttgagtaatgaccagaaatccaaagcatggagactaacaacaaatgtgtccattttcgcttttgttgactatgctatcaaggtcatatcaaaaacagtattgctcagagcaatgtcatggagctttagccctatgctatgctttcttctatcagttttacagttcgactattatattcatctttatttggagttggtatttttatgtggtgtaagggtcaaattttacttttcatatggatatccagttatcccaacaacacttatttaagagactgtcttttttccatactgtgtagctttgcaaaaataagttggctgtaaatgtggagatttatgtccaggttttccgtccagtgcaattgaccaatgtgtctttttatatgctgtactacgctgttttgattacaattcttttaaaatttgtattgaaatcaatatttccagctttgctacttttgctgaagattcatttggttatttggggtcttttgtggttccatacaaatttaagcattattttttcagttctgtaaaaaaaaatggcattggacttttgatagtgattgcattaaatctcttaatggtattatgtacattttcacaatattaattcttccaattcacaaacatgcaatgcctttttatttacttctgtttttgaaattcctttcgttggtgttttatagtttttagtataaaggccttttaccatttagattacatttacacctaaatatttaaatttttataatattctacattagatttttaaatatttcttcagattactttattggtatatagaaacattaccaacatagaaacactactgatttttgtaagttgattttgtaccctgcaacttcactgaatgtgtgcatctgttcccacggttttttgtgaagaagcatttaggtttttttcatatgtaagagcatgtcatcagcaattagagataaattcacttatatattttcataagtttcagatgttttttatttcttgttttgcccgattattctggctaggaattccactaccatgtttaaaataagtgatgagagtgagtatcgttgttttgatcttgattttaggcaaaaagctttcaacttttcagtgtacataatactgtttactgagggcttgtcatatacggcctttctgtggtgagacacatttccactatacttgatttgttgagcattttctccccatcatcttgttctctagtccccactcttattctccactgtcttcttcccactgttcttccctaactccccctctactcctactctctctccccaaagccttcttcccactgtgttctgcttaacaacttcttccctaccgccttccttccccacaccctccttcaccttccatctcccttagcccccaccctcttcttttttattcccccaccctcttctccctcttcattcctgatgctcttcttccccttccctgaccctcttctttcacttttttcttccctgaccctcttctcttcttctccaaccctctttcccttcttccttgaccgctttcttcttctacccttttcttccccttcttccctgacactcttctcctctcccttctactcccaccttctttttcttttttctttaccctcttcttccccttctctcccttcttccttgaccttcttcccctttctccctaactcccttttttaccttcttcccttaccctctttttccctctctttcctttttttcccttttcttccccctcttgttccatcttcttcccagacccccttctcccctctcctcttccccttctttcttcttcttccccgaccctcttcccggctgtcttctcccccaccccaccgtcttctcccacactccctctcgtgtctcctcccctcactccctctccccacagtccctctgcccaaagtcttcttataactgtgttctacccaacaacttctccccaaggtcttcctcctgaccctctttttcccaccccctctttttcagaccatcttctttctgactcccctgcccctcttcaccattttctgtctaactgccttcttccctgccattttctccccattctctcttcccaccatcatcctcacccccttctctgtgaccaccttctccccagaatttttcccccagtgttttctcccccacgatgtcttcttctccacagtctttctcctgaccctcttcttcccaatcatctcccttgttgactccttcccaacccctcatcacagtcttccccccactgtcttcttcccaacattttctccccagaattttatctccagctccccctccaccatcttccctgtacagtgttttatccccaccctctcttcccgacccacccccttctccccagccatcttctcctgaaccactttctcctcaccccctcacgccactgtctaccccaacactccctctccactttctctccatccctctccccagtcttctctccaataagttctgctcaacatctttcaaaattttctcccatactatcttctccaaccccaccatcttcttcccatcccaccgccaccatcttctccccacctccccctccaccatcctcttcttcccactgtccccttttgcaccatcttccccactcattccacccagatttttatccccactccctcaccccaccattattttccttctgggctaccttttcccagaccacttttttcccaactgtttgtccttaacccctcaccccactgtcttcctccccacaagccctctccctaaactcttctccccactgagtgctgcccaacatctcctccccattgtcttctccccaccttcatcttccccatttccatttcccaccctactctcttcttcttcttcaccattttttcttcatcttcttctttgccatttccttttcccaccccaccttcttcttccagactgccccctctccacctccactgtatttttcccactgtgttccacccaatatctttctctccccagaatcttttctccagaagcttctcttcagtgtcttctccccactccccccaccatcatctttcccactccctctccccacacaaccctctttctgacccttttctccctgaccacattctcccaacctccttctccccactccttcaccctacaatcttcttcccacactccctctccccagagtcttctccccactgtgttgtgtccaacatcgtctttccagagtttcctctctagcatgttctctttacatctccaccccaccatcttcttccagatcctctttctccctgaacctcttctccctgatcaccttctccccaccacctttttccacctgctcaccccaccatctcttccctacctcctcctcactctttctccccaatgttttatccccactttcactcctcaccttacttctccaactccctcttctccctattttcttcccccaccgtcttgtcttcttctcccactgtcttcttccccaaccatcttcttccccattccctttctccaccttcttctccaccccatccccaaccttcttcctatcccaccctctttttctgatcgtcctcttccccaccaccttcttcacaactgccttctccccaacttctcaccccaccatcttctcccccctcatacccacagttccactcccaaaagtcttctctccactgtgttttgcacatcttctccccagaatcgtctccccatttcctctccccaaaatcttccttcaaccctctctcaccaccattccatatttttgaaattgttaattgtgctgctataaacatgtgtatgcatctgtctttttaatgcttctttttaataacttcttttactcacagtggtgagatcactggataagaaggaagttctacttttagtttctttttttttttaaaaaaaaaaaacctccatcattcttcccaccatcttctgcccaaactccttcttcccaaagtcttctcccgatctgcccaaaatcatttccccaccatcttctccccacacttcttctccccatcttggaagagaagaagaaggaggaggaaaaggagtggggaaaggtggaggagaagaaggaaaagaggagaaagagaaaagaagggaaggagggtggaagggaaggagagggggaggaaaaggagggtggaggggaaggaggaaaaggagcataaaggggaaagaggaggtggagggggtgaagaagaaagaggagaagaagggtgaagggagaaggaaggtataggagaaggagggtataggggaaggagagtagagggaaatgtggatgaaggaaaaaagggtgagggggaaggaaggtagagggaaaagagggtggaggggaaaaagagtggaaagggaagaggctagaggaaaaaggggggaggagtgtggagaggaaggagggtgaaggggaaggagggtgtagaagaaggaaggtagaggggaaggagggtgggaggaaaggagggtggaagggaaggagtgtggaggggaaggagggtggaggggaaggagggtggaggggaaggagggtggaggggaaggagggtggagagaaggagggtggagggaaggggggtggaggggaaggagggtggaagggaagggtagtggatgggaaggagggtggataggaaggagggtagataggaaggagggtggagatgaaggagaagaaggaggatggagagaaaggtgggtggaggggaaggagggtggaggggaaggagggcagagaggaaggagggtggaggggaaggagggtgaaggagaaggagtgtggaagggaaggagtggaagatgggtagaggggaagaaggagaaggagggtggaggggaagaaggatggaggggaaagaggatgggagggaagggagaaagaaaggtagaggggaagaagggtgcaggggaaggagctggaggggaaggagggtggaagggaaggatggtggagagaaaggaggggaaggatagtggaggggaagaagggtggaggggaaagaggtggaggggaaggagggtggaagggaaggatggtggaggggaagcaggttggaggggaagaagaggctagaaaaatggaggaggtgaggggtgaatggggaagaaaaggttggagggtggaagggaagaagagggtggaggatgacaggtaatgggctagaacaagtggttgtattagtataaattcccaccagcagtgtaaaagccttctctattcaccacatctttgacactatttattgtttttgattttttaattatggccattgtagctggagtaaagggtatctcattgtgatgttaatttgcatttccctgataattagtgatgttgagcattttctatatgtttgttggctgttttcatgtattcttttgagaatggtttatttatttcctttgttcactttttgatgggattatttgtctttttcttgctgatctgtttgagtaccttgtagattctggatattagtcctttgtcaaaagcatagtttgcaaatattttctccccctctgtgggttgtccatttactctgctgattatttgttttgctgtgcagaagctttttggtttgattaggtcccatttatctatttttgtttatgttgcctttgcttttcggttcttggttataagccaatgtttaggagagattatctgatgttatcttctagaatttttatggttccacaccttaggtttaagtctttgatccatcttgagttgatttttgtataaggtgagagatgaggatccagttttattcttctacatgtggcttacctattatcgcagctccacttgttgaatagggcatcttttccccactttgtttttgtttgctttatggaagatcagttgtctgtaagtatttgactttatttctgggttctctattctgttccattggtctgtgtggctgtttttataccaatgccatgctgttttggtcactatagccttgtagtatagtttgaaatcaggtaatgtgatgcctccagatgtgttgtttttacttagtcttgctttggctatgagggctctttttgtgttccatatgaatttgtgtacattgattttgtatcctaaaacaacctcatccttcttctagtaatattgctccagatatctcattaaatttgatcattgcacaacatatgtatgccctgaaacataatatttaaccccataattgtgtacaatgattatgtgtcaattaaaaagaaaaagaaaggggcaggagtggtgatgagagaggaactgggccggggctgacgttttgctgcaggcaggggcagtgatacccttcaggctttaagcaagtgtgttgtcatctctgtaagtcgagccccatgtctcttctagtgacatgaaagaccaggaagtgcacttagcacctaggaacctgccagatagttcatgtgggtttgcatttgggggcacagtataaaggctgggtctttttaatgtctccacctccacccccacaaacaggatggcagagtttcattctcctgcaagacacaaatgaccctactttcctacttaacctcccccgggaaacagcaggaaaaagatcatgcccagtaagctgcttgaagaaatgggtaatgctcctatgctaatttcatgtttcaatcctttattgtattttctttaacaatcgaatttcgctttcaaaattaatgcattaattaaacactatatcctgttcccagcagcctaattatctttgccatgtaatctgttaaaagagctggattaaaatatttgattttaacacatgattttctaagacagttttctaagtgtccaatatttgctaattgaagaaaaaattactgctaattctggcctaaatattgccagtaataagcagccacatcaccccatctcctgctgcttccgccaccatttccacagaatccaacttccaccaacctgaggatctgaagagtttgttgggaaactcccccgcaccgacaaccccaagcctgattctagctatcaggcggatttatgccttgcattgtatagaggttaaagacatatgcaaattcaagtcttggtactgctactgacctctctgggctttaatgaccacaaggcattagtgtattttgtgaattaactcttatatacaccacttttatttacacacttagaacagcgcccagcacacagctagagctatggaagcatttgcgacgatcatcattgtcatcatcatcatcatcatcatcgtcatcatcatcatcatcatcgtcaacatcatcatcgccatcatcgtcgtcatcattatcatcatcatcattgcttctactacaatcaaaggctttttcaggagaggttctaatgggtcatttactctgtggtgtaaatttaagacactgggggaatctgcaataacgtcctagccttaacggtaaaacaaaagacattgcttccatgttaaaattatttcacagaaagacaaatatcgcatgttctcactcataagtggatgataaatgtgttcatgtggacatagagaatggaatgagagagaaggggactgggaagggtgccaggtgggaggggtaaggatgatgaaaaatcagttaatgggtacaatgtatgttattcaggtaacagataccctaaaagccctgacttgaccactatgaagtctatgcacataattacacatgtactccacaaataaaaataagtgaaaatttaatatctatatgttttaggctaaagggaggtgaaggccccacagggtgagttttcctgcctgaagaaaacttcccaggggagctctgtctgcctggaccccagcacgcagcaagcctggccagctttcccctacccacctccccagtagaggagtcacccagagcccatcctgcttcagcccaggcacccgcagagcaggcactcctgggggaaagtgagagtgagacaggctggagtctcatcaatttcacactcagcagatccagaaggagtttatttcagtatacgtgtgtactttgtgaaattgaagaggaaaatatctacatgcatgtgcacacacaccacacacaaatatatacaaatacacacacacatacacacacacaattttgatccagttctgagcaaatgcatctagaggaggaaaaatgtttgtgggctgaaaatagacaagggtacctcctattctcccaacagctcagagttgagcagtgttaacttaaaaatcacaagatgtataaattagaaaaggaggctttcttataaaagggtacagcctacaaggtggctgtccgcaggctgggaagcatagcctttggccaagaccagagacaggcactctgaaagagaaggggtttgggacaggagctctatgctgagcaggttggccaaacatacatattcaacagattgcaggagaatccatgaatattcatgaaggtggtcctgatatatgcatgtgactatatatgatgcatattcactttggggatgagacaacatttaactgtattagcccatccaaaggccttttcagaacacaaggcacatgactgtagaacttccaaaaaccagccagaactagtccatggtcagcagtctctgatcgggagaaagttactgaaatcagcctcttatctagtacaggctgcagttatggctggtgggacaggggtcagttagcctgcgtctgtgagctgggtaacttgtaactgttttaacattgcttatctccaggccagtgcttgctcagctgctggagttttgaaaagaaacacctgtgacagagcacagtttctcctttaagtgtgggagtgtggggcaggatcttaggtccaggttacaatttggtatctattgccacaaaagtccattctgccagtcttacgatctctattttaacatgaacgctggtcacttgctgtgtctgaaccagaaaggagaggggtataaagaggcatgtctgaccgcccatcctgtcatggcaggaactcaacttctctgggtccccttcaccacaaggcatgtctgtttagttgatgaggcttaggattttatttttagtttacagcagagagagtttttccaccctgggtactggcaaagtttgctccctccctcctcctggggtctgcagggggtggggaggggcagtgcagggggctccagccctcagctgcaggccaggcggacagggcaggacacagctgcctgattccagcccagcatcaaagcacccacatagcccagatcagagcagaaaaaaatgtaaaatgacagaaagttgcttttatgtgaatgcacccaagccatgttggatcactgtttagaatgatttggtatttcttttattgttttttttttttatttagtcagtgatttaattatgagaacagcaaatagtgttaaagcttcatgaggcgccaatagtccgggaggcctgaaagagtaaatacaatgatactctgtcatgaaatctactgagtgccttgcagccaccggctcatagcatttggctctgctcccagagaggcataaacaatgcaaaaacccataattactgtgtcagtcacaacatccctgcagaataccgagttccacccccggctgctggcttcctggcattggacaaggtgcacagccacaccgtcctctgctggagagaccccagcgactaggcagccatggacacccagcattcttaggactcctgcccaggcctccatctccccccacccagagatgacagcaagcacagcccagcctgccccatttcttgctattcacagacttccagggaactggggctgtgggcaggtcttccttcctcaacttcacccagggggctccaactgtaaaagaaaataaaacttaggaccctctgaatgtattatgccgaggaggaaggcaagccctggggaatgagtcatgtagcatatttgcagtttttcttcttagatgagagtttaactcttccttgttgttgttctgtaaatgactaatcatgggttattatagattaaatgattatagagcaaatgttatatattaaattatatagattaaatgattaccataaagtcttgtacccaactcagaccagatggtgtccaagacctcagcacggttacagccttaatgtggaaggttaaatatacgttttctgaaagaaaaagaccacctcgtctaatcagatcactatgactatgcagtaagcctctcatagaaagatgtttaaattctgttaaacttttttaggctttgtctgtatacgtgatgtcctgggtgggcctgtcctcaactttgcgcttgaataaactttctttaaactagattcagatccttttgattattttaggtcatcacgaccactgggttcctagatatccttctccctagagcagtgctgtccaattaaatataatgcaagccacatacgtagctttagattttctagtttaaaaaaattaactcaaaaaaattaattgcagtcatgtatcttatctatcccaatatgtccataatattagtatttcaatgtgtaagccatattaaaaaatatgaaacagatattttacattctttggcactaaacttttgaaatcaggtgtgtacttgccacagctcatcccagtctagccacatttcaggtgccaatagccacgtgcaggtaatggcaccatatagcccagggaaccaaaatggtctccctgagccacagcctgccctgggccctgtgagcctggaacagccccaccatcaccccactgtggctttggagataaaggcagggagggattccatcacagggagactgcacctccatctgcccctaggaggttctgccccaaacattttagtccccatgtacacattcccaaaggagcctggacagcctgcctagcagcccctgcctccagcaactgctgctgcagtggaggaagacactagctgccctctgccccctccctccctgccagtcaacagagaatctttgccagcccaacctgcccctccagtcccctacttccctgccccactccctccacccaagcgtttcttgaaatgctgctcagcctgtcctctgctcccctgtagatacctcacaaagaggccctgctgagcagttcagtttccagtggtgcaaataaataaagtggttggtgtttcagataaaagaggagagattcccagcctccccactcccaggggagcgctgaaatctcctgcactgctgcttctcactgggggatggcttacagaacagccccttctggaagacccccacccctcctgcctttaactccaaggaccctgaggtcacattccctcctcttgtctgctcaaatattctgattctcccttcaacttctgttcctttcctcctatattcaaggaaaaagtgtctttttttttctggttccaagcaaatcctacctcttgaagccctggtcctgtctttactcctctactcaggcctcagtcactcagtctctagtctcttgcaccttcagtctctgcttctccctagtctctttctgcagccccaaaacaagtctcttccctcagccatcaccaccagctcccactgcaacatacctcaacctcctggttatatctatttccttcacactcctttctccctaagcctttgcaacctgactttcttctccatccatcctaactctcagaggtcatcaggaccctggtcacacacattctcactgtctacctctcagagtcacctgtagcatgggccaacactttctcttcctgtcacctttgcacagcacgtgggcctgtaggtcttctccaggcagccgcagcacggtctttgcccctctgtgatagtacccaggctctggaaggggttgccacttgctaaggccatggggttcttgattttggaaaccatgacactcatccattcagttagtcgttcaatgagtattttttgaacaactgccacagtaggtgaccagcctgagtcagatactggggatccagcagtgaacaaaacagaaaggcctctgagctcatggagcttgtgttctacttggagagacatgatgtaggcaaaaaacaacaaattaaaaaattcaagataattgcagatagtggcaagtgctatgaagatatagaagcagagtgatatgatgagaaagagaggtttatggggggtcattttttaaatttaatttaattttattttttagagacagagtctcactctgtcacccaggctagagtgctgtggtgcaatcatagcttactgcaacctcgaactcctgggcttaagcgatctgcccacctcagcctctcaaggagctgaaactacaggcatgcaccaccatgcccggggagggcaatttataatagattgaccagccagggaaggcctagctcaggaggaaacacctaatctgaggcctgagtaaaataacggcttcagccaggctgacatgtgcggatggcagcgtcacagatgtccacgctgttcacaactggcatcctttctaatgggtcagtggtcacgactggctgcttagtctctatctcttctggtcccagttatgataaaataaacagtcagagcacaagttgcaaagacctcgcgacagccaggcatgggggtggggggcaggaatgtgacaagtgtggagggtcccataccttacctgcattccttacctgcctcagtaaggtgtttggattttactctcagggcctgggagggtgttgagcagatttcagcaggagagctacattctctgatttgcattttaacaggccactccagctgctgtggagtgtgtattttaggaagatgggagtgaaagcagagggtctggatgggaggctgtcattgtccgggttcctagaaacagacgctggtccagtataagtagtttgtttaggaagtgttgccggaagactggtaggggcaaagggaaatgagatctggaagggagggcagccagcccagggtgtccgcaagcaggttcccactgtcagcagctggagtttgatcccgctgggccctaaggaccgcagtggagaacacatgtctcagatctgtcttgccccagggctgagggcatttgagagttatcacaccagcccagcactcctggcctgatttgtgtgggcagagaggctctgacaaagagacacaggggctggcaggggcaagtcagggcatggggcagggccctgatagcatctgccacccagaggagagaccatgctggcccggaatggagtggcagaaacagtgattaaaagagaagtcagaggcctgtaatcccagcacgttgggagactaaggtaggaagattgcttgaggccaggagtttgagaccagcctgggcaacatagtgagaaccccatctctatcaaaataaaaataaaaataaaaataaaagtgagcaggttgtagaggcagaaacttgtagtcccagatactgaggaggctgaggtggaatgatcgcttgagcccagcagtttgaggctgcagagctatgattgattgcaccactgcactccagcctgggcaatatagtaaagccctctttctaaaacaaacaaaaaaatttaagaaacatgaggaatgaagttgtaataaaagctacaacgcagatgaaccttgaaaaaataacaatatttaagcacattttaaaaaactaataataccaaaaactatttaactgaacacgctaatgagtgaattgtatggtatgtgaattatatctcagtaaagctgtttttttaaaaccagagggaacagtaaagagaatcagaatacgagttaacccacaagactggctgatgaactggatgtcctgggtgagctgatgactgagagacttcaagacctgcagctgggcacagatgggggtgctctgccttgccaaccacttatgccaagctggttggaagctgccattggtcttggtttctccagcctaggaggtcacagggaactggccagggaagggctggagagcttgcagctttatgcagtcttaggcaaagcctgtttttgaatctcacgtccttggtttctcttcccaggcacactcttagcacagctcactgtagctcctcagcccactgtaacgtgccctattccagggagctgggcatctttgggtcacagtccttccttttcagccaatttttcgcgagtccacaaagagctgccactaggaagcaatcagatgctgcagttagagaggccggggaggaggacacacacacccaacctgggaacagcatgagtcatttccctctgtgcctgtggatggacgcccggccagacaaggcttttatctttaactgactctcagaaagttggattcattttgtttttaatttttatgggtacatagtaggtgtatatgcttatggggtatgtgagatattttgacacaagcatgaaatgtgtaataatcacatcagggtaaatggggtactcatcccctcaagcatttatcattgttttgtgttataaatattccaattatactcttttagttatttttaaatgtataataaataatcattgactgtagtcaccctgttgtgctatcagatactagatcttatgtattccttctaatgatattttcgtattcattaacatctccactttcccctctgctctcctccgcattacccttcccagcctctggtaaccattcttccattctctatccccatgagttcaattgttttaatttttaactccaacaagtaagtgacaatatataaagtttttctttctgtgcctggcttattttagttaacataatggcctccagttccattcatgttgttgcaaatgacaggatctcattattttttatggctgcatagtactccattgtgtataagtacattttctttatccattcatctgttgatggacacttaggttgcttccaaatcttggctattgtgaacagtgctgcaataaacatgggagtgcagacatctcttcaatagcctgatttccttcctttcaggtatatacccagcagtaggattgcttaatcatatggtagctcaattttcagttttttgagaaacctccaaactaatctccatagtggttgtactaatctacattcccaccaacagtgtacaaatgttccctcttctccacatcctcgccagcttttgttattgcctgcctttcggataaaagtcattttagctggagtgagatgatatttcaatgtagtttgaatttgcatttctctgatgatcagtgatgttgaacaccttttcatatacctgtgtgtcacttgtatatcttcttttgagaaatgtctattcagatcttatattgggttattaggattttttttttctatagagttgttagagctccttttatattctggttatttttcccttgtcaatgagtagtttgtaaatattttctcctattgtgtgggttgtctcttcactttgtttatttttttctgtgcagaagctttttaacttgatgtggtcccatttgtccatcttgctttagttgcctgtgcttctagggtattgctcaggtattagcccaggctaatgtcctggtgagtttcttcaatgttttcttttagtagtttcatagttttaggtcttagagttaagtctttaatccattttgatttgatttttgtatatggcaagagatggggtctagtttcatgtttctgcaaacagatatctggttttcccagcaacatttattgaagatactgtccttttagtaagtctgctatagttcattacagttggttaaatcaataaggctacatataatttaatcttcttttaaccagctgaacttgtaaagctatatgtgagccaagctaaaaacttctctggtcgcatgcccttcaattgtatctcatttaaccaataaaattttctccattgacttatttctttgacaaagattgctaatcagtttaaagaatggtgcaccaatttaatcacaggtctaggccatggcaatgctccagagagtaccaaatggtaaaactgtgatgggacagacggtgcgtaggtgacctagctagaaactagcccaaattaggtccagaggagatgctgaggacttctagttccagcatctccatttctcttataaggaatgttattccttataagaggaataacctcagcctctcggctgagagaggcttggtgatttgctcaaggtcacacagccagtaaatgtgatcagacggatgatctcttatttctcagtccctgtcttgttcctcacctcccactgacttttattaccaaaaaaatttttttccagttgaccacaggattacgaaaccttaatgaacttcagcaggatgagtaaaatgtgacaccggaaatactcacccacagtatggagtagctattccatgacaggcagggatcctctcactctaccactctgccagctaagcctgtgcatggaggtagtggggggtgtacaagttggccctctgtgtttgcatgttacactcatccagaagagcagacaagagaggattgaggacatgaatctgattgggatggaagccaagaaagagcaaaaaagaaactggctggtctaagagttaaactaccattcaacccagcaatttcattcctgggtatggatccaaaggaaaagaaattctacaagaaagacctatgcacccttatgttcattgcagcactgttcacaatagcagaaacatggagtcaacccaggtgctcaccaatgatggactggatgaagcaaatgtggaacatatacaccatggaatactatgcagccatagaaagaatgaaatcatgtcatgattccagcaacatgaatgcagctggaagtcattatcctaagtgaactcatgcagaagtggaaaaccaaatgcctcacgtattaagtggcagctgaacattgggtactcatggacataaagttgggaacaacagacactggggaatacaagaaggtgaagggtggggtaagggccgaaaaactacctattgggtactgtgctcactacctgggtgatgggttcaatcactctccaaacctcaacaccatgtaatatacctttgtaacaaaactgcacaggtaccccttgattgtaaggtaaaagtttaaaataattaaagacacccaaatagctaaatgaattcaaacaaatgtacatttgaataaaaacactcaatgtggcaaaatcctcacataattagagatacccttgtacaggtcccagtatctagtaaatgctcaaaaaatgaagggaaaaataaacaaaacaaacaaactggcgggcaaatgtgagcaggaagatggcctgagcctatgtctgcaggctgcctccacacggctgactccacagggctgcactcaggactgtgagccacctccgccaagttgggcttccgtacgcccctgagcagtggcagctgagcaacgctgtgcaggaagcaggctgacaatgtgcacaagttcaactcgcccaagcacgttcttcatttcagtgttttaaaacctcatgcattcctgccacctctcttcattatagacactgctgcacataatccgtgcagtgaggggtgagccactcggctggtctcccatctctgggccctcccccctccccattgccctggcaggcagactggatggcagaggagaggccttttgattgagactggaatgaatctgcactgttttcagaagtaggtggacacggggaagcctgcatatttctctaccacccagtgagaatttctcatccacctgcagaattgctaggcctcattcttttgtcatcacagctttctatttctagagacagggtctcacgctgtcacccagactggagtgcagcagcatgatcatagctcactgcagcctcaacttcgggggctcaagtgatcctcccacctcagctcccaagaaactggaactacaggcatgtgccaatttttattttttagagatggagtcttgctatgttgcccaggctgttctgaaactcctggcttcaaatgatcctccttccttggcctcccaaagtgctggaattacaagtgtgagcaaccaagcctggccttgtcatcatagcttaatgcaattgagagtgggtcagttctccaggctggttaacaccagcatctgtagtcaaggctgctaaaacaatttaatttgagggtccagggaggactgagagaagtcctggaaccagtgttgggagaaccaataggcagtgaccctaaacttgctgagcctcaaggcacagagcagagaacacagggaagggcaggagcccagccttcccccgacatcccccccaacctcagctctgcccactcttgaaggtacagctcatgcctcctcttccaggaaccctttcctgactatccagccacagggctgaccacttcttaaaattcctatgcactcagggctcaaaactcacagtcaaattaaatccagcaaatatgtatcagtttctggacactaacaacatggtatttgtctctagggtagctcatcccatgctggaggtggggactgacggagagcaaacctgcaaaatgcaccaaccagctccacgtgttgctggcacatcagagggtggaatggattgggaaggatccatagaggatggcctcccagatgctgtgatggtaaatgagaggcctcctggattccccttatagttgggttctaaagttgacacaaaaagcaaggccatggatggtcaagatgattcttgaaactctcttagaaagatgccatgctggagataaacacacttgctcatagtgactccattcaaccagccttccctccagcattagggtagacctgctcactcagttggcttgtactgcagggccatggtataaggaaaaccagtgtcttcaatgactgaagtcacaatcagtgatgtgagatgcttaggtctggaggttccgggaccaatctgagctaaaaagcggtgatagtgatttctgctctgtcctctctggggcagacacatgcagcatatcatgggcacaattgtcagtgctgtttaaattgtatcctctctctctcttaattgaacttttgtcactgacatgttgtgtgctgggcttctctgcctagcttcctatgtgctctacaggtgcatatctgtcccatccctcagttttatttatgcagaatctgctgcatctctggaagatttgtgagctgactgcaaacacaccaagagtaaggggagcagatgttttctctcagccccgaatcccactcagagtgcacacaagccatggcacagagcaggggcccagagcctgcttgctagaaggatcctctttctccttccccagagactgcacagaaagcaccccggccccttctggggatgtgtgccatactcatggtgcagctctgcagcctcctcctgaaagcacttcctccagaggtgagcaggagtgcctgtcccgggcgtgggaggtggctgggtgcatggcaggagtgcctgtcctgggcgtgggaggctgctgcgtgcaccacaggcgtgcctgtcccaggtgtgggaggctgctgggtgcacccctcctgcagcaccagggccgcttggtgcaatgcctgcaggtgctcaggagacttgcctgtctgggctccttcctgcctgctggatttcctgaagaaagggtctagggaataatgcagggcttggatagtcattgtaccattggccccctgctagggaacccagggatgagaaggggaggctgcaggatttaaggggaagtattctggacagattttcctagcttgcttttaaacaggtttgaatagttcaccctgagttggtgacatttcagcttccttcatctctcacattaggggcaaactaaaatataaagcaaaaaagtcattgaatcatcagggcctcctttttctcttctgtaaaatgggagcaataccactaatctcacaggatggttttgaggattgaacaaaataagttaaatgtgtggtgaataaaagagaaggaaatagtgtctttcacagcaacttgggtggtgctgggggccattatcctaagtaaagaaactcaagaacagaaaaccaaatactgcactttctcacttataagtgggagccaagctatgggtatgcaaagtcatgtacaggggtgtgatggacactggagactcagaagggggaaggttaggagggggaaagggataaaaagtcacctctggggtgcaatgtacactattgtggtgacgggtgcactaaaatgccacactccaccactatactattcatccgtgtagccaaaaccactggaacccccaaagctagtgaaatttagataaataaataaatcaacaaataattttacttagtacaaaatgtgtggcaagctgtaaagtctacaaatgctaagtgctggcagaaaaagctttgcctttcaggggagacaggaaggagagcaatcaggggcctccggaggccatgtgcgcagtcccaggagagtggacctgggggttggaggagcccaacccagcaggaagagctcggagcacctgctcctgcctgagcagcatccgttcctctcccgggggctttcctgtgcggcaccccctcatctgtttccagctcatgggtgtggggttggggggacattgtgagctgaccccacgcccagccctaggactttccaggcatgtaaggggtaagttctctttgtgatgaagccagctggtgacaggctcgagtaacaggtgatcaggagtcctcttcaccatggcacattttgaaaagccatggcatgcagggaggggccagataagccaaggcctttgctgtcaagaggacgaagcacagagaacttctttccatgaacttatctacagccgtctccaaactcgtctcaagcttactggaaggcacagatgcagggcagcccttgccgacaagagtacccactgcctctggcttctgtcttgctctcagcccagaaacagcagtaaacatccagggaaaggtgaactccgcatgttctcaggggattcacattggacctccagagtcaagacgcctctgacaaagggacgcagtgttctgaggctcttgtcttcctcagagaagaaagacagcctcttgttttagcagttgccaaaattccactggcatgccaagtggtggcaggtgaaaatttggacaaccacaaagcacttctgactgtgaaatgttctgccacagctgcaagacagagagactgtttcagagactgtaatgacccacaaaacagattgtctcattacctcctgggaacctggtccattccaggcaaaaacctcttccatttgcaactccagatgttggatctccagtgccactgttgccaatcacagtagttctgggtcttaatataacaggtgccagctgcattagatttttctctgctgcctctgctgggtttcattttcaacctgctacaaattagagggacttctagcaagtcatgttttataaccatttgtgggattggagtaaaatccagcatggtcacctcactgtttcatctgctgttgctttgtctttctgtctggaagagctggatcctttaagtaagggagtcttagaggccgtatcatcatgtttcaatgatttatacatttactggactcactccccttcagcccagtctaaacagatggtagggagaaaactgagcctcctgcaccaaactgttctgactcttggagctttctttgcagtcgcatttattgtgcattattcctgttgtcagggaggcaggtttgaaagctgcagctaattaagaagcccacacaaaaccacagacacacagccttcacttcagggtggcctagaagcacagccaccaactgaaccctgcacggtttgatgccatgccagagaaagtgaacccttggttacacgggattacccggcccatggaatatccacactcaaagctctatccaaagaggtaactcagaagtgaatgttctcaagcttttggctgagccaatctctaaataagtcagtctaggagaatgttatcattggaccaaccaaaccacacatacttggaccccatggaaatgctgatgctttcattgactgtcgcctttaagtcattttgcaccttggattctgtccaggccatgtttaggagactgtaaggttcattgttgcagcaaaagctctgaaggccaagtgtcctattccaactctagctgtgttttttactaactgtgaggctttaggtgcatctcttaacttccctaagctctggtttctgcatctgcaaaagtccctctctgaaagtgatggtgtatgtcaaagacatggagtcaacctaggtgtccatcagtggactggataaacaaaatgtggtacatctacaccatggaatactattcagccataaaggagagcaaggccacaaactttgcagcaacatggatgcagccggaggccattatcctaagcaaactgacacaggaaaagaaaaccaaataccacatgttcttacttataagtaggagctaaacactgggaacacatggacataaaggtgagaacaataaacactgggggctactatgagggggagggaggaggcaaaggtcgaaaactacctattgggtatgatgttcactacctgagtgatgggatcatttgtaccccaaacctcagcatcaggcaaattacccatgtaacaaacctgcacctataccctcaaatctaaaataaaagctgaaattataaaaaaagacataaaataaaaatgatggcacatatgcatctaccagataagtgggtatcaatagcttttgcctcctaagcctcaattttccctctcctagcagccatacctcagtttttttgggggggaaattatgcctctctactctcagttttctgggtaaaagtgaaggcagagggtgatcctgccagtaatttcagacttgaacacgacacttagacctggccaattggggtttctaccgacctggatgtgtggttggcacaggatgtatgcacaactcaaagggtctaatgagagagccccaagctctttcttccttattatgtagggttaggctcacaggaggtgctttatcagagggatggcggtccaggtcattcttaatctttcctgctgctgacatcgctgttccaacatggcctttggacattccatttcagatcctgtgctgatgaaacagacttgtgaatatggctcctgatccacaggatgcaacctgaaccacagaaaatgctgagttctccagaggctgtcttcgtgccctgcctgtttcccttaagtgttcaatgtgtgctgatggcttcctgctgtgagggcctgagactgtccctggagagcttcctaagaaacatcagggttctcactcagggcgggcaggaagcgctgaggagctgatgccttaagaacgaccttcagccaatgatgggaaggactgaaggttgagcgcagcagactccttccctcaggaggcacagctctgtggcctgggctccacagggtcctctggagttctgcctgagccccgctgtccacagcagtgattggctctttaataagcagtgtcttctctctcctccctctgcctcttcacccttctcaactgcgctttctgggttcatctcctgaataaacacttgttctaaaatctttgtctcagggttgtttctaagggaaaactcagcctaaggtaagtcctttcagactcaagataatgggtctatccctggattgaaacagaaggtagaggtaggatgtggtggctcaagcctggaatccaaggcacaggattgggagatcaagacagaaagatagttttaggccaggagtttgagaccagcctgggcagcatagctaaatgctgtctctgctaaaaataatttttagtagacaaattagttgggcatggtgttgcacacctgcagtcccagctactcaggaggctgaggcaggaggatcacgtgagccctggaggctgaagctgcactgagctatgatcacaccaactgcactccagcctgggtgacagagtgagactctgccaaaaagaaaaaagaaaaaaaaggaaagaaaaggaaatacgaggtggaagctagcctggtgcagtacagagggagggatacatctgatgtgtcatctcaatagagttgtttcacaaattgattccaggacccaaacatgaaaatctgtttttgaatagactgaaatttttttactgacatatgttgtactttaacatcacagaatcataccgctggaaaattagctcattctttgagttttaagctctttttctctagcagtgagttttcttccccaatgaaacattaataggaggaaatattgattgagcgctttccctgtaccgtatttgagcactttctgtactcattttttacttagttttctcaatattactgtgatgtagttttcattattttatacaaaagagaattaaaatctcacatagacactcctcgccatcatatgaaatggatagatgcaagagttcttttgtagatgtgactggtagccatagagtccacaatgtgaagggcattcttagacaggattgtgcattgggagactgcagggacatgagataatcctccccctgggagtagggacacagcagcacacagctttcctttgagattttagaacataccccttggtgagtcatctgcaactcctctctctctccctcactcagcctcaccttctcaccagcattccccaagacttgtttctaaagctcagcacagatatctatatagacacacaatggcatggccctgccactatacacatccagatgttacactcaccgtgaatttgtaattaatagcatagcccctcttttcaagggaaaaaagaagtattcaaggaatacttctccaaccattagagggatgtctttctcccctaataaccctctgttctttgcaatcttaaactgagtcttccatgcttactcttaccaaccaatgtggcaatgaatatggccaatcccaggcctccctgctgatgaaagtccacccaatcaccaactttatactgactgatatgtgcccagaaactcttctgaaggacacatcttcagttttgcacaggttgtgaagtgtacccaagtaaactgagggggtcttcaggtcagggtctagacatcaaggtcatgtgctgctgtcaacaccccaaactgcacttaggggctgtatatggaaccagtgaggactctgtggcaattgtgagagggtgcagcttgaagcaaggttcaggcccctgccgcagtcaccacaacgtgggcctctttgctgatgttcataaaagactcgtggttaagcactgttgctcaatcttgctgctagttatctactcagaaaagaaatcattttataaaaagacacctgcacttgtatgtttttttgcagcactattcacaatagcaaagtcatgaaaccaacccgagtgccctgcaatgattggctgaataaacaaaatgtggtaaatatacaccatggaatactacatagtcataaaaaattataaaatcctatcttttgcagcaagctaggtggagctggaggccattatccttagtgaactaactcagaaacagaaaaccaaatactgcgtggtctcacagaactaaacagagctccccacttagtgggagctaaacaatgggcacacatagacataaagacaaaaacaatagacacgggggacccaaaagttggggagggagggttgaaaaattacctattaggtacaatgttcactatttgggtgatcagttcactagaagcccaattcctaccattatataatatagacatgtaacaaacaagcacatatattcctgaatctagaataaaatatatatatatatgtttaaataaagggcttctgtagctgggcgtggtggctcataactacaatcccagcactttaggaggccgaggtgggtggagcactcgaggtcaggagttctagagcagcctgaccaacatggtgaaaccccatctacactaaaaatacaaaaattagccaggcatgttggcacatgcctgtaatcccagctacttgggaggctgaggcaggacaatcacttgaatctgggatgtggaggttgcaatgagccgagaccgtgccattacaatccagcctgggcaacaagagcaaaactttgtctcacaaaaaaaaaaaagaaaaaagaaaaagcctggggggtggcttttgcttagaagtgatagtcatcctcctgaaccagtgtctaggattgttaattttgctgttgaaaatcccgtaaaggaaatatgagcatgtcttcattattttagacaatatatactgaattctgtcaagtactattatatgtgccatggggaaccactcgtggagtttttgtcttttgtgttgctttttttttttttttgagacaggttagattgtggcttattgcagcctcaactttccaggctcaggtgattctcctgcctcagcctcccaagtagctgggactacaggcccatgccaccatgcccagctaatggctaatttttgtttttattttttgtagagatggagtctcaccatgtttcccaggctggtcgcaaacttctgggctcaacctatcctcctgccttggcctcccaaagtgctaggattacaggtgtgagccactgtgcccagcctcacatggagttcaaaagctaggagaagatggaaataaggtcaacaaaaaaatatattttacatagtaataaaagctctgaagaaaattgaacaggttaatgaggaatagggtagcacagtggacgggggatgtgaatttggatggggtgaccaggaacctccctctgaactggccattctggaggggagacctgaaggatgaggagccagccatgaaagctagagagaggccgggtgccatggctcaggcctggaatcctagcactttgagagtgccaagattggagaatcgcctgggcccaggatatcaagaccagcctgggcagcatagccagttcctatgtctacaaaaaaataacaaattaaaaaattagctgtatgtggtggtgcgtgactgtagtcccagctactggagaggctgaggcatcaggactgcttaagcccagaggctgaagctgcagtgaattatgattgcatcactgcatttcagcctggatgaaagagtgagactgggaagggaaggggaggggaggggagggaagggaagggaagggaaacaaagggaagggaagggaagggaaagcagggcagaagaaagaagaaaaagtgcagccaactgttctggggtggaatgagctgggcatattcaaaaatcagtgagaagactgctgtgcaggggatggggagagaggaatcccacatgtaggaaagtgcaaacacttaatgtttgacggctccccctgctccagagagtgctgaatccatggatccaggcctgttcatgaatcctccagaaccaagaacagcgcctataaccagttaccagctcctgtcaccttcccttccaggaggtctctctaacattggttgctgttaagtccaggctgtcactctctcccccctggacacttgccccacattctccacagttcttccagcctccagcctcatcctgcccaggccaccaaactcattttccagaagcacagtttagcataggccatgcctgttcagaaaactttcctggcctcctgccagctgcaggaccaagtccaggtgcctccacctggcccttggggcccagccccacagacccaccctgtccacatcctcttcccatgactttcccgtgcctgtgctcagccaatctgtgctcactgctcccatccctgagctcctcttccccagcttcagggccttggtccaagctgtagcctcctcctgaaatgatacttatgatggaaataataatgaaaatgtagatatcgccttgatattcacaaagccctttctcacatgttattttcttcatcttcacaactttctagacagcgtcttgcctcccctgtacaaatatagctcacccttccaggcctagctctagcggcacctcttccaaggagatcactcagatctctcctccctttgtaccatcttggtccatcatctgccctctaatggccatcatcatgttcagtcgtgaatgctgtcactagtcactcatgctggttccccccacactaggccatctctttgagggcaagaactgagtccagactctctccatggcacccgagacaagacagcagagggtcaacgaaagaacaaataatgatggttcaaatgtgtttctacctgaaagagtgaatgaatgcatgaagaaagtcccaatccttagtgtctccatacataggagacaaaaataatgcaaaaccttttctataacatgaaatcagcttaagtttcaacggacatttgtgctgtaaatagtgagaaaggggatcaagaaagaagtaaaagatccagtcactttaaaacagtgactggaacaatcccaagacaaaatccaagaaaggccaggctctctccctctgatacatccaaagcaggttcatagactgcatgtggaaatggcaatgtggttgctgtgagaggtgtgacgggagcccccaccccagcacccatggaacaccaacggcactcagctgctgcacatatatgtgtacttgagcttatacatatgggtctctaccctattgaggatttcagtggctttttagcccgaggacaaagttccctcccctcacatcatctctgcagggcccagcgcaccatctgtgagcagctgacaatatctgccctccacactgcctcaggagcttgccaaaagctactcagaatcagaagtgcagtattacagccagatgcactgaggaagtgtgcctccactcctgacattagcctctgtgtgctcacatcagcctgggatactgggggctccatgcccggggtagaaggaacgctatagatggccaactagtgttgcaccaaccaggatctaagcaggagttgcctcctcgattaggagtctggaggaaaagccaatcatgtttctggatcatactctccagttgcagctggagttattgagacttagtggaatttattttatttctttgacaaacactgccatattgcataccaaatactgtttttaacacttgataggtattaattcattaaattatcataacaaccctatgggataggtactattagtatcattttacatatggggaaatgagtcctgcaaatttccgtaacttacccatggtcatacagctcgtaggtggcagaccctggatttgaacccaggaagtctgtgttcttaacatcatatgatactgtctgtgtaagttaagggcaaaacatttgggtgcaagacctaacacccaaaagtttactgtctctcctcctctgccgcctccaaaagcctcagactaagcaagaccatcttcactgttggtttggaacattctgaagctcatcagaacactaagaaactgtgttatagtgaatcagcacagaggccacataatgtagcaccatttagctttggagcaggctgctttcccatggacctttctgagtccatgtctccttgttagtacaagagagatatctacagtatcccacagaggtgtttatggaatttcactgaaataacacatgtgaagcacacagggcaaggtcaaggatctagtaaattctctagtaaaacatttgggtgcaagacctaagacacaaaagtctctgtgctgaactaaatgctcttagctgatgtggttgcctgcatcttacaaacacaggttcttaacctggtagtccatgaaccttactatgcagaagaataatgaggaaagtttaataaatacagactcctcagtcccactatgcaaaattctgattcattagctttcaaaggagcccaggaattcatgagggatcccaatacaagagttctcagattctgaggcatccatgactgcaaagaacatcacaaacaactgcattcaattctctgaaattataagaaatatccattgttgaagtaattgatgacctttggcctccttataatgaacacaaatggtaatgggagttggtgacagagtgaatgtggtggccctgccaactgtccattctgctctctctgtaaggacagacacttcccagacatcctctgccttgtaaggagctgggttatctgtaataagaactgatatttattgagtgcctaccaggggaaagccacccttccaatgctttctatacgttttgtacccagttctctgactaaaattactatcttattttatagatgagagaaatgaggctttaagggttgccaaagtcacctaataaagttagaatttctgctctgtcaccaaacacctattcaaagcctaatgccttccattactattccactaggaattaaaattggtgcataaggcacgttatgtttattgcagtactattcacaatagcaaagacttggaaccaacccaaatgtccatcaatgatagactggattaagaaaatgtggcacatatacaccatggaattctatgcagccataaaaaaggatgagttcatgtcctttgtagggacatggatgaagttggaaaccatcattctcagcaaactatcgcaaggacaaaaaaccaaacaccacatgttctcactcataggtgggaattgaacaatgagaacacatggacacaggaaggggaacatcacacactggggcctgttgtggggtggggggaggggggagggatagcattaggagatatacctaatgtaaataacaagttaatgggtgcactacaccaacatggcacatatatacatatgtaacaaacctgcacattgtgcacatgtaccctagaacttaaagtacaataaatataaataaataagcaaaaataaaaataaagtcattcagagtgataaataaataaataaatactggtgcatgaggatccaaaatttctagccatgctatatatctatgagacatgaccttcaaatgacctgatatggactgttgacataaatatcagttatagtctcaaaggcctcataataacttaggtttttgcataaatgaaggaacatgacatataataaagggtgtatatacagagtctattaatgtgtttagtttttaacaaatatatataagagtagataacaaatgaatgttgtctttcaagaatgccaccttgtaaatctgtgcacttttttccagcgatatggcctttgtgcataatattcttggacctcttcttttaacatagcttccagacctgctttttaacctcacgaagaaaccaaaacgttattttagagttgatttatctgttagattaaacattgtattatccagtttgaatgctctttgaacacattttgaatacttcccaatattatcccctctcaaaagatgcatatttatctccctgaggaagagtcaaaaaaaatgcttgtagacaatcatggtacttcccaaattcaatgcaaaaatttttgtgaacaaagatcatatgctggctggaaaactctggactacacattacacaaaacccaacccatgtgacttaaacagtaaaagaaatactgtcttatgtggcaagagaatggagtagggaaattgaggcctttggatgcacagaagtgttatcaaggacaattttggatattaagttcctggggagtttctattaaaatcagccaaattactttatggtcacagtacaaagaagtctcagtaatcatagaaatgaaagacactaattcagtcagaattaaaaagttataaagaatagaaactaactctggccaatttaggtaggaaaataaaaatctactggaagaacatggcggagctcccaaaaatgaaagctgaaaatccaggatcaaaaacggacaagcaccggagtagtccaacatttctgcagaggaatctgattggctgagcttctactcgaagcctgctcattggccaggggagggctgtgcaccctgattaatagccccaccaaaatggtcctcaagggcgaccaaatgattcctcgtaaggaagatgtcatatcgcggcagagagggacttggaggccaggaggccccacacaacaaatactcagtacaagcctcatcaaggcagatcttgcagacactgacttagcagatctaatcttggggcttgcaaagatgacaatgtcagcgctgactgtcaatcttcaggaaaccttgtgtgatggctgctgtcagcacccaagtcactcccccattcccctcgcaaagccagtgcatctacaccatcactcacagccggccacttctttggagagcttttcttgttcagtaggattcaccttacccagaaattcctgagcagctatcctctgtccctgggtgtgtttatctgcattatgtggaaaaacagaagcaaaaagacattttaaacatttgctcccaatgaagaagaaaatagcctatcattttatttaacaataaatgaagtaaaaaaaaatatttacaaccccatagagatgtttttgcattctaaattacatgaaagaggccaaaagctaacattttgacctatttgtccagcactaagtggagtaatcaggtaaccaccacttcaggagcctgcccagaaggtggtcgcacagaactaatcacataaccacagcagcctgtgtacatctcaccccaactctgaccatttgaataagatcagaagaaagtaattataggattcactttaatgtcaagcaacaaagagaactatataaacttggaaaatcgaccttcaagatatagtcatttttatttttaaaaaaagcttaagaaaagacacaaataattggctcatttttatgagattgaacttcaaggacagacattttttggaagtaaaagtcgtctagcagcattacctggtgcctgacccatagcatcccgaaagtgccaagcatgttggcacacactgggagagcctcgtttctagttccccaagaaaccaacagggtccccacttccactctctctcttcagggtaaaaatgtaaccactttggcatcaaaaaaaattctgaattatccacttggctcattgaagatattaattttctggaggaaaaataattcccaacacttactacaatgataaaggagactgttgtttcagctggaatggattccgtaaaagcttgatgtttctgacttggctaatggagtgagagggcacgggttctgtctgcgggtaacgcaaatcagtgccgccaccatcattcagtgggtgtcagagctggccagtgcagtccccgaaggctgcttgccaatgctgggaataaatgatttcccctctttatttgctatgtcaaggaatgataatggagcacattccatgaccatttgtcacggaagcgcagtcccctccatggggaatgtgtgggagtagcaaggacctagtgttttcaattaatcagggccaggattactcacgcaggaaatgaaagagaaaatttaatacttggaaatcgggtgaaagcagcaaccaagtctaattaaaatacactttctgcttcgaatttacatggcaggatccattttatgagtcacctttattcttgttgcatttctcttgcccctggaaactgccttaggcaaaagcacccaggagtttacacctgtgcaggtggtttctttccaatgacctcacgtgaaggcaagactggtcaaagcagatgggttgtgtggccatgttcttcctcctgggttttggcgtggccttgaattattcctccttgccctagactgtgcccaatggtcatgtatgtcgagcacagctccttattcccaattgcagcacctagaattctgctattggcttcaaggtgcaagcccgacaaagccctttggctggcgcacagctctgtgtgtaattaatgggtgatttgtagcaggcttgtgcctcgaatgcattgtttctctcattttcctttctggtgggggttgaagcagccccaggggactgcagcactgtcatgccacagcaaagaggctcctaccaaaaggcaaactaatatacactgtgtagtcctgagcaaactaagcacagacaggatttgttgtggctaattagttttatcacttcacaaaaacctaggttcctagtttccagagaaataattacaattgcaaatgaagaggcaccactgaagaagaaggtcttcagcacaaaagtaaccacagacccccacagcatctcccctgcagtttgagccctgccagggatcagctctaggggtttggaagccctgttgtctccctaggtgtggatgacacacacacatccactagcatctgtttctctgttagttcacaaaagatgtgttcaggggtcagatctttacacacacctgcacccgataacatgatgtatcctggcagattcgcgaaagactcacaatgccatgagtatccatgaatcagtgcaaatggaagacctcagctttgagaaggccacaggaatttcagtcagtcacaaaccaaggctggggtcagggtcatttccagtgggaccaatgaaggtcctgtacttaaggggtgaagaaagacaaacaagaaggaaagaagaggctccctttgagttgctgagtaaaatcagaaattaaaaaatactctgactgtaggtacatggagtacataaagttgaataactagtttaaaatgagctttacttttcaactgatggtcttaatatcttttagactcaaccatgactgtgaagcgaaggaagaaaggagtgaatagtacagaatctgtcgatacatggatatagatccagatctatgcatagatgtctatatatctaaatgtatgtagatatatccatttccatccctatatatctgtgtgaaaccacttctcaattaaaactactcttgctgctgccagacacatctcccttaatgacacctgcattggagaatgtataggcactgtcgaatgctcaaatgtgagctcattaccacattgggttctagtttaaaatgagtcattgtcactatttctctgcaagtcttaagagtagctccttttttgttcgttctgacttagccccaacccagtttcacctctggttttaagtgataatattaaacccttggcccatgcctttgctcctgcgaagactcacatgctaaagactgcagttctcacaacccagcagaaaggggagtctaggcctgccctgactgaatccaggaacaactggctgggtggagaagatcagccaggggcctgcaagtctccatgcctgatagaaagagctgcatagaccaggctctgccctccatacagaaaatgcttcattatttatctggatgtagaaaggtgggaaatagagatgttggcattcagcatccccacatatgggaaaatgccacgaccttgcatgtgaccttcaccttgtcacctgtcctccccaggcaaaaagcaactatcttattgccctttttgtgattagaagcacctcttccagcacaagattgcataggctgcctgtgcccatcaccaaaagtctcagacctaactatttcccaaagcaaaagactcatggcccttccctgtcccctgctgctgagctcctaggcctagtcccccgtggctgctgtgtcctaacgcctttggaaccattgtctccttggcctgtttgctccacccagagagagggtcagggtggtgacctccccaggatgtgtctgcagggtgcagactctcagggctgagctctgggattcatccccaacctctaccaaatcctgcctgctcctagagcagtggagaggcagagtggatgagctgtaccagaatttgcccttggcctgtatctcagaaaactccccatgaaataacacattttagagggaagaagaaagaccatagacttagagataggagattaaatctgactatggtaaaaaatgtttgaaaaattcgttatctctgtttgttcacaacactcactccagttacacccgtcaccccagagcagcagacttttgccttcttaacttgtcagaaccagtgcccagttctcctggggcgttttagatgctgatctcaagctcgccaggtggtgtgagtgggcagccaggtctctcatccacatgagtgatctcagcatctgttctgcctgtgccatgaagctccgcaggggcccttccaaccctgggaatgtgttgccaacaagatcccttctgtccctgtcaggcagaggtggcagagcactccttggcagtaagctttgtacccgaaccatttcttttttcacagtctttagataaggcagtttgagttcatttcaatagctggtacttcccgggttctgccaactgcctgtgtgctgtgaggagaggagagagcttttgtgaaattaagatgaatttcctccatggtttcacctttgtttacacattaataatacactccccacacctgaccgcacgggctgcattgcagccttcactactgctggcagctgtgccactgtcccctccatccacagccacgtctcacgtcttgcctttgcaggatgcccccaacttcccccaagcactgcctccacatgctgtcccttagaaagcggcttcctgagggctggtgtttcccagaagcctctctctctggctttgcaatttccctcttcctgcaagcaggtttcatctctcagactgagatgcatggcagccctcgccagcctggagcccttcccagggtcacttcactcacctggaccccttctagagagccccgtggtaactggttatctccacacattcacctccgggggtggggcctgcgtcttggaacacgctgagcgtatctagtaatgacaagggagagtggaaccatgggggatgtaggtggaaccatgacttctgagatattatagctattacatacacacaaacatgcatgaccatgcacatgcaacccccccacacacacagaaacacacacaccacagaaacacacgcacagagaaagacacacacacaccacagaaacacacacaccacagaaacgcacgcagatcccactgactagttgggaaatgttggtttttttcctttcttttttttttttttttagagggagtctcactctgttgcccaggctggagtgcagtggcgcgatctctgttcactgtaacctccgcctcctggggtcaagtgattctcctccctcagcctcccgagtagctggcattacaggcatcagccaccatgcctggctatttttttttatattttagtagagatggggtttcaccatgttggccaggctggtctcatactcctgacctgaagtgatctgcccacctcagcctcccaaagtgctgggattacaggcatgagccaccataacaggccaggaaatgttgcttttgtgataagaatttggcattgctcggctctgcctggtctctctataagagatgtatgtctacactcaggaatcaacctggtgctcatttttagccaggtaggttaaaaaaatagtagaccttccccatgcatatttttatgtcttcattgatctacaatgattgcacatatttctggggaacatgtgcgattttgataatgcttcctgtgtgtgtttgtattgtttcactcatgtgccttctagggcaccccttttccaaccattcacaatctggcagctcttctattatttggttaatgtaaagaaaaataatagtaacactacattgacattttgaaaatagaaaaatgagtggttggctttttgctctagaactctgcttcgaggggctgtgtaagcaaacaggatggtctccccagatcataggaatttagtcaacgtgagccctcagcctggcgcacagcctcctgccctgcagcctgtttctcttaagctctgtgtggaatgtggtcatctccttggttaaaaccagctcctgaccgagcctggtaatttatagtgagctttcctcatgaccatgctgaagtgtcaatcccaggaggagccacagcttcatcaccataacacgcgacccatgtgctggcagggactcactgcatctgcaccactgggacccctcctctccatgcaatggcgcaccctatccccctccatcacctcataaaaccctcccttccctttcccacactgctttggagaatatgcccgtgtcctccttacatgtgccaagtaataaaactcctgttaatcaacacctgccttctctgccttctcgtggagagtcgcttgtctctcaccaggtagacagattctggttatttttgggaaacagctggcccatatccagatcccccagagaagaggagctgagaacatttctgttcagggctcactgggccctctcctcacctccaggactaggcaatgaccatctgggtgctagaaggaagtgcttctacaaacttgctccagccagataaaagagaacaagcccttcatttgctcacttcctttgcaagcagagtgttgctctgcagtgtgctcctgagaggaaaaaactgccctgttggttcaggtcagtcaagccaagctcagtcacagaataagcaggcgcagtgggggcagaaggtagggagggcatggggaatgtggtaccactggggcggagagcaaagcaatggggagtcagtctcccacatgtgtcttctatcagtttatttattcactcaacagacatttattgaggaccaaccatgtgcaggactgatctgagtcctggggtagaggcgtaagtaagacagatgaggtgcctggtcttaaggggtttgtattcaagtgggagccagggaacaagagacatacaataaagatgtaagtaactaagttattttcagataaccactagtcctgggaagataattaaaaggcagtgggagggagggtaataatgttttagaacccaactggggagtactagcttggtgcaataaaaccagatacccacaaggaggtttttcagcaatagaaagaaaagcttttattgcagttgccaagcaaagacgaccaggcagctattgctcagatcctgaccttcccaatggcttgcaggaaaggatttttaaaggcaggggtaaattacaggaaaacagaagccacaggcaaaatcatcaatcaatacctggaggttacacattggtttagacctaaaagggtgtgatatcttgaagtggggacttacaggttataagcaaattcaaaaactttgcaatttgcaattggtgataaaagagcagctttatttaaaaatctggggtaagtagaaaaaatgtcctttttttgagatagtgtctcactctgtcatccaggctggagtgcagtggcatgaccatagctcactgcagcctcctgcctcagcctcttgagcagctgggactacaggcgtgcaccccagtgcctaaccaattttttaatgtttttttttaaatagtgagatggaatgtcactatgttgcccagctgatctcaagctcctggcctcaaacaatcatcccaccttggcctcccaaagtgctagaattacaggcatagctaccttaccaggcaggaaaagaatgtcaactggctagggtgagtgactttctccaagacccccaggaagaaatttataacaaaagatgatggttaaagttcagtcttcacttcccacttacctgaggtctgcatattggctgatcccttcagtgtgggtccccagtgggggtctgagtttctgaaagacaactcagaagtacaggttaagatgttctccttggattctttaggaaaaacaaacatccctaggactctaatttcctcaggtgtcctttaggctactattgccttcttttttaataagttacttattgacttctggagctagctaggtgcctggaacttcccttgaaggcaatcatgattctccttgatttccatgtttggggtctgcaggcccctaataaagggggctcctgctccatctcaatagggaaagagaaactagatcaggtcctcagggaagaccttggcattgagacctgaatgagaggagagacccaggtaagtgaagtaagaacattccaggaagaaacaaaagcaaggataaaatccttgagttgaatgaatacacatttctcaaaataagacacacagaaagccaccagacagatgaaaaaatgctcaacatcactaatcagggaaatacaaattagaaccacaatgaggcaccactttatcctagtcagaacggctattttttaaaagtcaaaaagcaatagatgttggtgtggatgtagtgaaaatggaacgcttatacgcagctggtgggattgtaaattagcacaacctctgtggaaaaagatgtggatatttgtcaaagaactaaaagtagatctaccattctacccagaaattccactactgggtatctacctcccaaaaacagtcactaaatcaaaaaaacacttgcatgcatatgtttattacagcacaattcacaattgcaaagacatagaatcaacctaagtgcccatcaactgataggccaacacacaatcatgaaatactactcagccataaaaaggaacaaaataatgtcttttgcaacaacttagatggagctggaggccattatgctaagtgaagtaagtcaggaatggaaaaccaaatattgaacattctcacttataagtgggagctaagctatgggtacgcaaagacatacagagtaatataatgaagtgtggagattcaaaagcaggagggtgggaggaaggtgagagaaaataaactacttattgagtacaatgtacactacttaggtgacgggcgcactaaaatctccgtcttcaccactgtacaattcatctgtgtaatcaaaaacaacttgtacccccaaagccattgaaattttacaaaatagaaataaaaaatttaaaagatctttaagtcaagaatatttatgaggataaatacttttgcccaaacccattgaacccaaatgccaccttattcaggaggtctgttggggccattgcacaccccttcctcagagcccttgagccaggagctgctgggtctggctgtctccttcacctcctttaggaggtgactacatcttattcagctctgcctcttccaggccaccaggttcaattgataccagctgttcaacagagactgagtgaatgggccaatgacaatatcggactggagtgacatgtctgtaccgaattgagaattatgacaattttaacattgcagcattctcccacttggagtttaatttgaggttgtattttttcttagtaatcaactgtgaggtaaaaatcaactgtttttggagagttctctgcactttaggggacaataatacagacagctgtatgtcgtagcttacggcagtgttacctcagtctcattgacataaactgatgggctgtctgatgctatgcagatgtggcttcaacatggctagacaggttcatcccagctccaaaaggaaaggagcagataagcatcaggaaggcagcagagtacagaacctctgaaagttcactcctccataaaagccataaaaaaaactggcaaaaatggccagaaacaactttttcagaactctgaaaattcaccaactgcttgcaacaccccagggagtgtttatgtaagaaaagcagctgaatcccagtaagaaccgagggctttgtagcattttgacttgccctagtctcatcctcttgctccagctcagcagcagccttggaaatcacctgcactccctgtactgaaagggatagaatagatctcattcccaaagagagtcattatttgacctgtctagtgcttccctgaaagaccttgtctttattagtggcccagtactaaaagccttgggggagggaggagcatttgcctgtagcatttactagtgtttcaacgggtacagctgcccgaggtaatggatagcatttggggcaaacaatagactaatgaaaagcttaaaggaaaagctgaggaatgagatgtccataaggaccctgaaaagctttgtcacattcctgggaatctataagaccctgagaatctgtccagtagggctttgcacatgtccaggaaccggagaaggccctaagcactcaccactgactgaagttgaggccctgcaggagcgggaaggaaagttgagacagagttgccaatttcctggcagagtgctgaccatgtgccccaacagacgcagaaaacccatctgcaaagactgagagatatttcattccaggcatttaaagaaacctctgtccagttattagctggccactaagctaaataagtagagactttgttaccaaaaaggggtcccgatccagaccccaagacagggttcttagatctcacacaagaaacaatttggggtgagttcataaagtgaaagcaggtttattagagaaagtgaaggaataaaaaatggccactctaaaggcagagagccgcttcagctgctaatgatacttattgttacttcttgattatgtgctaaccaaggggtggatttttcatgagctttccaggaaacgagtgggaaactccctgaactgaggattctttccctttttagaccatatagggtaacttcttaacatggcaatggcatttgtaaactgtcatggcaatggtgggagtgtcttttagcatgctaaaatattataatgagcatataataagccatgaggatgactagaggtcaattccatcaccatcttttggcgggttttagccagcttctttactacaacctgttttatcagcaagtttttgttttgttttgttttgtttttttgagacagtcttgctctgtcacccaggctggagtgcagcggcatgatctcggctcactacaacctccgcctcctgggttcaagcaattctctgcctcagcctcccaagtagtttggattacaggcacctgccaccatgcccagctactttttttttgttttgtatttttagtagagatagattttcaccatcttggccaggctggtcttgaactcctcacctcgtgatccacccacctcggcctcccaaagtgctgggattacgggtgtgagccactgtgtcccacctttatcgcaaggtttttatgacctgtatcttgtgccaacctcctatctcatcctctgacttagaactcctaacctcctaagaatgcagcccaataggtctcagccttattttacccagcctctattgaaaatggagttgctctggttcaaatgcctctgacagcttcagtggccactaggaacctattttgataagtaaaggtaaagaggtaaagaggttaagctgcttttcaagaaacagcaggctgtgccaacaatgctggttttagagctgtaggaacgcaaaagttacacccaaacagaaggaaatgttgacagtgtctgtagggtgcagtgtgggccacagaggaaggttggtctccaggagaatgggactcgaggttgaaaatgggactcaccttggcttacaggtttgcactagcagccgtgtgtatccactccatcactcgtcctctctgcaggatacaaggctttccaatgcaaaatggcacagtgttatgcagagtattaagtgacttgataagcttctcatcaggggatggaatttcctccattcctcacagcaaccagttcccaaggtttattgagggagcgtcttgctaattgtgtggctgttatgccggctttcccagatgaacatttttttttagcatctctcactccctagaaatcccactctgcctcagggatgtaaactaaaactaaaattctaagctccccaaccatctgaatggacccttcctcttggccaagagcattcattccagagtttacctgaaaaacgagttcaggccatgatgaggaggcaagggccggatacccttcaccatacatacgctccccctattggaattcaggcacaactgaccagcatcaacattaaaacagagatcttaagactttttgtagcaataagacaccaaattccagcctgaatgtagtgtagcatcacatgaaaggtatcaggccctgaaagaaatcaaaatattttaccctaaaatagatttctttacacattttaaaatggccctgcaaagctgtctcctgtgggaaaaatttacattctgtagcgaatccccttttccttccagatcttttctctgatccaggagagaattaactaagagtctggcactttttaaaagtcagataagaaacattcacaatctattctttctgaagtctgcaacctggaggcttcatctgcacaataagaatcttggtctccacagccccttatctgaacttgggcactcccttctgttgattctagatcttaactctttcaaccaattgccaatagaaacatctctgaattcacctataacctcgaagcctccccaaccccactgccttcaagttgtcccacctttctgggatgaactaatgtacatcttacagctattgattgatgtcttatgtctccctaaaatgtattaaaccaagctgtagcctgaccaccttgggcacatgtcgtcaggatgtcccgaggctgtgccaaggttattttaaccttggcaaaataaacctctaaattgattgagacttgcctcagataccttttggtttacaagggtgaggtgagtcactgggcagttttattgagactgagaatttggtggttcttggggttccaaaatccataaagactttttttagacctatgtctacagaaatagccaccctcttctaggttttgggtgaaagcagcccttcctggtggaaaagaatttcagcagtagcaaattgtttcttaacatggtaaaaaaaaaaaaaaaaaaaaaaaaaaaaaaaaaaaaagtctgtctcaggaagacacaatgtcattatttccaacaccatcctcaacagggacctagcaaaattatacgggcaacagtgccatcaagtggccaagcaggaaaataaccaatacctgaaaaagcgttttttccaagagtgaaattctggtggaagcgcttggaggagaatcatctgcattcccctggttcccctctttgtcctgggaggcacagacaagctccacattttcaactcaggactttctcaggtttttaaccttttcccaggaggcagtgcgcagcctcaggtcagggctgcctgacttgtcctctatgtgcagctccccttcctcagcccctctgataggcggcgtcctcttcacccgggtactggctgagaggtcacctcctctgaaaactctactcactgcatctaaaggagccactgcactccacacatcactctctacaagacacaagtttcatttttcttcatagcccttttcgcattgaaaatactttctttattcatctatttacctgcatatttcctgcctttcccacaccctcacgccctatgttgaaatttgatgagagtagagtcttacctgccttcctcactgccatgtcccaccattgggaacagtggccggagtagagcctccaatgcaacacgtgcgcttgcatgaatggataaacgggaggaaggaaagaggagagacgcaaaggccagtgttttaccaggaggcccaagtgacattgtctccattagcaacttcgggaccaacatcttacttcccttttttatttttaagattcagtgacttcaaatgcaaagggagttcatattatcaactcttatttagagtgaaccgagaatcagttaatctggctttaaatatccctcaaaggtgcagaattactccaggtattgcacgcagactgtaccttcctttaaaatccctctgtcctcataaagctgctatggacccaggaaatctctaagtgagtcttccctgtgtaactgaggagcacttgtgttaaaatacagaggatctccagcaacagaaaaagagtgaacctttgcctacggaacatgacaatttcctggaatcaaaggcctctctgcagtagctgatcatgttttacatctgtgggttgatcttgaagacgtgggcttatcaatatatcttgtcaacagtgggcattcatttaaataaaatcaaaaactgcaggcaaagttgccagaactggcaatttataggggcattttcactccaggagaactaaaaataagctactgttgagtttggattgcatttttatccacatataaatagctttggtaggtcacagtcgaggcaacattgctaaggaactctgcagtgtctcctcaaattgtcaggccactatcttaaaagacaggcagctagtctatagcaattgtgtggaaaccctccagcttttacttagatccccagctgctgcttcagataattagatgggaaaacttgccctctgagacaggtaaggatgatggagttttccggcagcgaattgcatggcaaatctgggcaagagctcccttccaaagtatctggtaactgagaggaaactcatttagaatttctgtcatgcagagttttcaaaaaagacttggggaaagccgtgcaaacctgcaaagatgatatttgtatctccaggctggaaaagtacccttttatctagtgatggccatgctggcttctctgtaagcactcacgaattgcttttcgattttcatccagaattataacatctgcgtaccgtgccccaccaacccaagtaaatatgaactgtgaatacatcccaccttcatatcacagttcagccgttcttagcattcattcttttactcgttaaacacttgctaagcccttactaatgcttccctcccactgtgcctgggcgggaggcacgctgagatgatgccctgccctccaggtctgaaggaggtgtggcataaggaagagtataactgaaaaagaagattcaaagcacagcaagtaagagcttcaccaactacttgcttcgtgcacttggccagtgacttaaactccctgagcttcagtttcctcacttctacagtagaggtgatggcagaacctgccacttagagatgctacaatctatgtaaattcttcaggatctagccacactattgtaagcagttagggaaaccaaatattttaccccaaaatatatttttgaaataatttgagatggctgttcagagatctggcaaacagaagtctccctgcaaagctgtcttctgtggggggagatttgcatctgtagggaagctgcactgatactgcgagtttttctctgaggcctccccttgtccttgtctggatctaggaaagattcactgagatcatgacaccttttaaggtctaaaaaagacatctaccacctaccctctctgagggcagccacctgtgaggttttagctacttaacaagcctacctatgctagccaggcctcatcttctccccctcccatcacctgttttaccaccataatttgttttgccgcaatccaagccccaattatttttatttaatttcaattttcattttagattcaggggatgtagcatgattgaacccatcacccaggtagtgagcatagttcccaatatacagtgtttcaacccttgccccccttcccttcccttcccttgtaacgtccccagtgtctgtcgttcccatctttatgtcaatgagtgcctgatgttcagctcccacttataagtgagaatatgcagtatttggttttctgttcctgcattaataggcttaggataatggcctccagctgcatccatgttgctgcaaagaacatgactttcgtcttttttatggctgtgtagtattctacggtatatatgtacaacatgtaaatccacaaatgtagatttctttatccaatccacagttgatggcaagtcccatttttttctgtagcctcaagatggcatgtaagcttctgaacccctttgggaggtaggagtccttactctgtgtttttctccctgtgtgcacattaacacatttatatgccttttctccaattagtctgacttttgtgggttgatttttttctttgcaaaccttccgatatagctgtgtccccaactaaatctcatcttgaattcccaggtgttgtgggagggacccggtgggaggtaaatgaatcatgggggcaagtctttcctgtgctgtcttcatgatagtgaataagtctcatgagatctgatggttttaaaaatgagagtttttttgtgcaagctctctctttgcctgctgccatccacgtaagacgttacttgctcctccttgccttccaccatgattgtgaggcttccccagccatgtggaactgtaagtctaattaaacctctttcttttgtaaatttcccagtctcaagtgtgcctttatcagcagcatgaaaacagactaatgagcattagacagactaatgttcattagaacagtaaataggcaccagtgcagtggagcactgctgagaagatacccgaaaatgtggaagtgactttggaactgggtaacaggcagaggttataacagtttggaggattcagaagacaggaagatgtgggaaagtttagaacttccaagagacttgttcgatgggtttgacaaaaacgcggataatgatatgaacaataagttcaaagttgaagtggtctcagatgcagatgaggaacttgtggggaactgaagcaaaaatgactcttgctatgttttagcaaagagactggcagcattttgcacctgccctagagatttttggaactttgaacttgagagagatgattagggtatctggcagaagaaatttctaagcagcaaagaattcaagaggtgacttgggtgctgttaaaggcattcagtttcaaaagggacacaaagcataaaagtttggaaaatttgcagcctgacaatgcaatataaaagaaaatctttttttctgaagagaaattcaagccatctgcagaaatttgcataaggaggagctgaatgtcaatccccaagacaatagggaaaatgtctccagggcatgtcagaggtcttcacatcagcccctcccatcacaggcctgaaggcctaggaggaaacagtggtttcatgggatgggcccagggttcctatgctgtatgaagcatagggacttggtgtttgtgtcctcgccactccagccatgactgaaacgggccaatgaagagcctgggccatggcttcagagggtgcaagcctcaagccttggcaactgtcaagaattggggtttgggaacctctgcctagatttcagaggatgtacggaaacgcctggatgtccagtcagaagtttgctgcaggggtgggtccctcatatagaacctctgccagggcagtgtggaaggaaaatatggggtcagagtcaccacacagtgttttaactagggcacttcctactggagctgtgaaaagagggccactgtcctccagaacccagaatggtagatccactgacagcttacactgtgggcctggaaaagccaaagacactcaacaccagcctgtgaaagcagttgtgagggaggctgtaccctgcaaagccacagaggcagagctgctcaaggccatgtgagcccacctcttgcatcagcatgacctggatgtgagacatggagtcaaaggagatcattctggagctgtaagacttaactgccccactggattttggacttgcatgaggcctgtgtcccctttgttttggccactttttcccatttggaatggctgtatttacctaatccctgtacccacattgtatctaggaagtaactaacttgcttttgattttacaggctcatagtcagaaaagacttaccttttctcagatgagaatttggactgtggacttttgagttaatgctgaaatgagtaaaggctttgagggactattgggaagccatgattcattttgaaatgtgaggacatgagatttgggaggggctggggtgaaatgatacagcttggttgtgttcccatccaaatctcatcttgaatttccaggtgttgtgggagggaccaggtgaaaggtaattgaatcatgggggcaagtctttcccatgctgttctcatgatagtgaataagtctcactagatctgatggttttaaaaatgggaacttttctgcacaagctctctcttttcctgatgccatacatgtaagacataacttgctcttccttgccttccaccctgattgtgaggcttccccagccacatggaactgtaagtccaatcaaacctctatcttttgtaaattgtccagtcttgggtatgtctatttcagcagtgtgaaaacggactaacacaccttcagaagtggagtttttctcttggcccctaataaactggaacttcaaggattcagctgggaaggggaatatttccaggcacccatggttacacagctggtgagaaaattcccaaaggctttatggagttctggcactttgggtgaatcacttcctggcctcaggactcatttccttattatttagttgtggaagttgaattaaagttgattccatccagctcttactttctattgtttgacctgagtcataaaaaataggatttggacttgcagagataaaagagaaaaggatattcccagaggagactagcagggagtattctttaatcagaaacatcacccttgttgaccaccatctatagaacatttaattcagcagttgcttcctgagcatctaccatatacccaggagagatgttcaaaatacttaacagctaggcgtgggccccaatggcctaaggaatggatgctggccaaggtgctggggcagggtctagggacctctgctgggccagtgttacctaacaggggatcttgatgaggtcctgggataggagcagagtggccaggaaaagaagggggagtattaccatggtagctcggtgcagtgacttgttactaataacatgtaaattctcacactccaatgtgtcaaagttgagtaaaattcagcccctttcctcagtctctcaagcaagcaatgctcccatgagccagcaacttcatcagtgggaatgacaatgagtgacaaggcccagtagaggcagccagcccacgagaggcaggggattgactccctccaactgccagggaggtgagatcaggcacagtcttcctctcaggggtcattcctaacccagacagtgctcaggggaaaggacagacatttccctctgtgcagatccaagcggtaggccgattaccaggggcagctaccacaaatgtaaatacagagtgaaaaatggaggcaaggccaaatgaacgctggcaggtctagggtgatgggcctcctgtgtcaggaatcttgcaaccgccaccggggaggggtgtaatataataacaacagtcagaagtgacattggccataaacctccaacacatgccagctgaaaaccgggccttaacaagtccagtattgatgccctggacctgacactgtgttaatacattatccaaatgcactctctcatttgattatcaaaccactctgtgaggaaggtactttattttgtactttttttagatggagatttgctcttatcgcccaggctggagtgcaatggcacaatttcggctcacttgcaacctccgcctcccaggttcaagcgattctcccacctcagcctcccaagtagctgggattacaggtgcccgccaccatgcccgactaatttctgtatttttagtagagacaaggtttcaccatgttagccaggctggtctggaacacctgacctcaggtgatctgctcactttggcctcccaaagtgctgggattacaggcatcagccaccgcacctggccgatgaaggtactttattattttcatattagagaaggagaaactaggcctttgtaaggccaaagcttacaaagcaagttagaagctaagccagagcttgcactaaggcctgactgaccctggggtctagtccttaaccacagtgctgagccatcttcttaaacttgcacagttaatgtgtaactgaaaccacacctacccacgtgctggctgacaaattccaggtccttcaggcagcatgaatacttcatccttgaaaatttttctggatccttaaatcagacaaatgaacccacagtcctcctgcccatggaagacaccattagccttcccaataaggaaaattactgggatgctattttgacatactgagagtttttcccccagaatttcattgcatctcattcctttcttcctttccaaccatcaggccatttcttgttaactgcgtgggagaaagtatagaagaataagaaaaagcaagggagctgaagtaggccctactgatgctgcatccatgccccttcagtcctcgccacttctgggcatccctgtgcaacatccagctgccatgtctgcattcctttaccttagaactttctcctcccagacccaagggaggccaatgtgccagagaaataacttctataagcagctgtcatccaataactaatgcaaactggtagataaataccccagctccctcacctgtcaggtgaaataacttaggggcttgtattccccctttttatagaacaatgttctaaatttgtttcaagttttagattcaaggggtacatgtacagatgtattacatgggtatactgcatgatgatgcggtttgggcttctagtgatcccattgtccaagtagtgggcctagcactcaataggtagttttccagcccttgcctcccttccttcctccccagtgtctattgttctgctctttgtgtctctgtgtacccaatgctcacctcccacttataagtgagaacgtgcagtatttggttttctgtttctgccttaattctcttaggataatggcctgcagctgcacccatgtcactggacaggaaatgattttgttctttttcatggctgcaggaggcttgcattctatgccagctctcagaactccccagcaggattaagcagccactcacagtgattactggtttgatgacacacattttgctggctgctttctctgcccttccctacttctctaccagcacttcccagaaccacctcccaaataaaccttctcagagtctgctcctaggaggaagccagcctaaggcaggagtgatttcttcattctaagtcttaaagtttaagccccaaggaactcaaagcatagaataatggcaatcagaaacaacagtgtttcattctcagaactagaaaagattccttgattttggagaaagaaagccaggatgccaggaccttcagactttctgacaaagtgatgcttgtactctgccaccacttccccaccccctgttctgagccaagtagggagaaaagcagaaactgcagagagtttgggggtctctaagagcagattgacctggcttggcctctctagtgggagccaggcaggggccaggaaactggaaaaaacatcaagctgcatgggacgtctaggctgaccatgccaggcaacctcatggagcgctcatgagcacaaaaactccaaacacacagaggctcagaagcagggcgccctccaacccatggtggagggatatgtttccccatctgccccagatggcaggggcttggcacagggcttccaaacagatgaccagataggtcacacatgtctcatatcctggagaggacacctgtgtgcccgcctcacacctcggctgcactcctgaatttgcagtggttttgatcctcatcagactgacagtatcctgcctaagtgcacactgagctttttccttttctgcaccgcagcttctccaacactgccagcaggggaggagacaggcaggtgggaactcagccacaggaacacaggagcagcagagaagtgctggggagatgtcccatcctctagacaagcttccaccaacgggaaagagagcagctgggaacatcgacctcacataaacaactccaagaggccttcgccatattcctcagagcatcctggttggactgaactccagctgtctctagcatgaccaactcaataacccaccatgttctgaaccttcccagtgactcatttcctggagtcagctcccaaataaaccacctgcacacaagttcttacctcaggtctgctttcacgggaaacccaggtcaaatacatgctcagaagttaccaaatacacaaggatgatggggaggacctgttcccccacaccatagaagccccacagaactagatgcaacctctttgaaactgcaaaaaccctcatcagctgcaatttccataacccctaagaatgggacctcacaaaagaaattaagttcagctattaaaaaaaataggcagaactactcttgcatttcttgaacacatagaaacattacctttgacccaaggatgagataagaaagcagggtgctcatgctcctctgtccctgcaggccaggtggacaggcttcatggagaactgaggtgctgccgcaactctttgctcacaagtgaccatgaccctgatgagatgggcagcccgagactccaagtagacaatcaagagggcctttaaggacatcctccaggcagttctggatagacgaggctttagtgaaacaggcaggtcaaagggtattgctacttccacagtgtaaaaagccaaccaggtgctccatttctcttggctcctgtccagagtctaaagcatgagctcatctcagaagcccacgttccacatgcaaggggtcaggggtgcctgggttctgttcctgagtagctgggaccacaggcactttccaccatgccagggtaattattctatttttttgtagagatgaagtttccctatgttgcccaggctggtctgaactactggtctcagggaatcctcttgcctcagcctctcaaagtgctgggattataggcattaaccacagcacccgtcctgagcctgcatccttgaagacattgttaagccactgacttaattctgtcattttcttatatctgactgtcttgttataggataatcggccctgtttttaaagatttttattgagatttcacttttatctgtgatcagtaagtgaaaatggtgttttaagtaaatagagcttttgcaactactagagttttcataaactaagtattaagaacaactgtatgccatttcaatctttaagaatgaaatataccataaaaattcagtaatctggcctcttctagcctgggaggatgctaggttactgggttttccaggtcagtgaaagatactgtcttgattctcccaaacaccctaatttcacagttataaatttaaagaaaaaacaaaatctgtaatatacttgaacagaaattcccagttttcatggaaagttttctgtgtaacatttattataactacataattctatttattttgaagccctaaaagtttaattattttttaatataaaaattattttaatataaaagacattcaattgctaaaaaatgttactttaaaacaactttcaagcctgtggctaaaccaatcatttgaagtgctcttcctggcacatcctagcaaaagccaggatcacgatgttgattatgacaagactttgacccaagttgtcacaggagtagctgaggatgaagcagtagatgaggtcactgggctttgactctgccatgacaatctgggtggctttaacctctctgagctgactgtgcatttgcaaaatggtctcattagcaccacctcttacagctacaggagagagagagagcacgcatggaagatgcaaagtggtcagtagtttcatggcacacagtgagggcacagcccatggtgaatgcaattgatttttaaccatctctccatccatcccctgtggggccttcctttgcacctccagtaaccattgcttcctcctttctcaagtacacagcactctttgcaaatcacatacctaattacgtctaacatcttcctgatggtctctatccatttcctgtgtttcaatttcatctccaataacactagaatctcccagggcaaggcccattgcacaccccgcctccaacatcctccacagcacctcagtcagtgccaggtgtgcaaagtctgcctggataaattctcccctgactccttccccggtgggcggggggatgtgggagaggtgtcatgggaagacatttctgtctcctgaataacagttactgggtctacgtgaattcttcttgggatagtttccaatgtacactgcaggaaactacagaatgaatagtatctttaaaaaaattctttcttcatatggtatatatacaccatagaatattatgcagccataaaaagaatgaaaccatgccctttgcagcaacatggatgaagctggaggccattatcctaagcaaactaacacagggaaagaaaaccaaatgccacttgttctcacttataagtgggagctaaacattgtgtacccatgggcataaagatgaaaatagtaaacactagggactccaaaaggcgggaggaagggagggagttgagggttgaaagattatctattggatacaaagctcaatatttgggtgatggatacaatagaagcccaatccccaccaatatgcaatatgcccatgtaacaaacatgcacaggcacatgtacctcctgaatctaaaattaaacataaaatgcattcttacagttcaacaacaaagaaggtgcccttttctgccttctcaccatgtctcatagttccagctgtgtggctgcatctgtggagggaaggtccctgaggcttcctgaagacccttgagccctggctataacagagactgtggctgaaatgttaacagtgctacctgtcaggctccaatgccaggctgctgggggtggcaattggcctcttcaaagctcaggactcaaaaagaaaggtagaaggatgctctcacctgctgtggaggacatctgcttgttttggtcattcagcctgattagggcactttgattttctttttgggatccacatctccccttctcacccatgtggtggggtcttctctccttacatgtccagaaagcccagaaatacatacattacccaatacaagccagctgaactcaatgccagggctttagtatagagaaacattccttattctgtgacctggagcttgcagaggtcaccacatggacagaggcagcctgtgaataaagccagaatgcaggaagcacaggagagagaaagaaccaaagtagcatcagacttcctggagtttttagttaagttggcaatcagattctctttcatgctttatttttcttttcaatttcaacttttgtttcagatacagggggtacatgtgcagggaatattgcatgatgctgaggtttgggtatggatcccatcacgcgggtagtgaacatagtacccaataggtagcctttcaacccatattctcctcccttccttccccccaagtggtccccagtgtccattgttgccatgtttatgtccaaacgtgttcaatgtttagctcccacttacaagtgaaaacatgcagtgtttgggttttctgtttctctgttattttgcttaggattatggcctctagctgaatccatgttgctgcaaagggcatgattttattcttttttatggctgtatagtattccatggtatatatatatataccacattttctttacccagtctaccattgatgggcccttgggtggattccttgtctttgctattgtgaatagtgcagcagtgaacccaccaaggcatgtgtctttttggtagaatgatttattttcctttggatatatacccagcaatgggattgctgggtaaaatggtaggtctgttttaagtgttttgagaaatctccagaaaactttccacagtagctacactaatttatattcctgccaaaagtgcataagtgttcccttttctccaaaggctcatcagcatttgttcttttttgacttttcatttttttcaatttttttgacagagtctcgctctctcaccaggctggagtacagtggcacgatcttggctcactgcaacctccgcttcccagattcaagcgattctcctgcctcagcctcccgaatagctgggactacaggcatgcaccaccatgcccagctaatgtttgtatttttagtagagacaggggtttcaccatgttggccaggatggtctcgatctcttgacctcgtgatctgcccaccttggcctcccaaggtgctgggattacacacatgagccaccacacccggcagttttttgacttttagtaatagccatactgactagtgtgagatggtaacaaactgtggttttgatttgcatttctctgattactagtgatgccaactcttttttcatacatttgttgtctgccttcatgtcttcttttgaggagcatctgttcatgtcctttgcccatttcttaaggggtttatttgttacatgcttattggtttcatttccatatagattctggataggggtgccttgtttgcaagtatctcctcccactctgtaagttgtctgtttacattattgatagtttcttttgctgtgcagaagctttttagtttcattaggtccaagttgtcaattcttgtttttgttgcaattgcttttggggacttagccaaaaaaattttgccaaggcctatgtcaggaagagtaatttctaggttttctgttaggattttcataattgtaggtcttgaatttaaatgtttgatctattttgagttaactttttatatggtgaaaggtaggagtccagcttcaatcttctgcatatggctagtcagttatcttagcaccatttattgaatgaggagtcctttcccccattgcttgtttttgttggccttgccaaaaatcagatggttgtaggtgtgcagcttaatttccgagttttctttttcgttccattattttatgtgtctgtttttataccagtgccacgctgttttggttactgtagctttatagtagaattgaaagtcaggtagtgcaatgcctctgggtttattctttttgcttaggattgtttatgttatttgggcttctttttgcttccatattaattttataatagtttctctaattctgtgaagaataatgatatagtttgaattttaatcccccatgttgaaggtagggcctggtgggagatgtttgggtcatgggggcagatctctcatggcttggtgctgtactcagatagcgagtgagttctcatgaaatctggttgctataaagtgtggcatctcctctcccactctctctcttgctcctgctttcaccatttgtcacacaagctcccactttacattctgccatgaccaaaagctccctgaggcctccccagaagccaagcagatgccagtgccacagttttatagcctgcagatccatgagccaattaaacctcctttctttacaaattatccagtctcaggtattctttatagtgatgcaagaatagcctaatacaaatgacactggtagtttgatagaaatagcattgaatctgcaaattgggcagtgtgaccatttttatgatattgattcttccagtccattagcatagcatgtttttccatttatttgtgtcatccctgatttctttcagcagtgttttgtggttctccttgaagatatctttcacctccttggttagctgtattcttaggtatttcattttctttgtggctattgtaggtgggattgtgttctggacttgactcagtctggacgttgttgttgtattgaaatgctactgattttcaaaactttattttgtattttgaactttgctaaattgtttatcagctctaggagtctttaggattttctgggtgtagaaccatattgtcagtgaagagagatagtttgaatttttctttttcttttttggatgtcttttatttatttttcttaactgattgctctggctaggacttccagtactatgttgataggagtggtgagagtggacatccttttcttgttccagttctcaaagggaatagtttcagcttttgaccattcagtatgatactggctgtgggtttgtcatagatggctcttattattgctagatatgttccttcgatacttgtctgttgagggtttttaccatgaagagttgttggattaaatgtttttatagacagttttaaatgtattatacactattggaaagggcttcctgacacttgctgcttaaagcatctgagtaacagacttccaaacaaattgaatagagacttcagctaataccaactcattacaaaattatcctttttttgtttttatagtaatcttctatacatcatctcatttcacccttgaagcagtaagtcaggaacttgagcccttattttacagatggggaacctggggccaagaaagtgctatgagttgtgcaggatcccttggtgtaggtcaaaaaaccagctccactgcagagctgcctgtaccaggctatgttcacctttgtaacttctacaaaacatcaccttcaagctttataaggtcaggataaatttatttcctatcagtaacactacttaaagcactgcttttgtattatggctactgtgtcagtaaagcacaggtgaaatctttttgcaaaccagctcccttccccaacatactgttctcataactgtatatgctctgcaatgcttaattcactgatttcatgaactcgctggaagaataagaggattagtaagagattagtttagataacttgaatctctgtagaaaaaaaaaatcacagtcattctttaagctcctgaagattcagcatttggggagggagagaaaagccgaatatctgaccaacactatgtttcactaacattcttggctttaaatctgcaaaacaaaaggttttacaaatgttaggctaattgttaaatgtgttttgaactttccagttcaaaagcagtcttcagataatcatttttcctaggttttggaagctctgcatgcttcaaaaactctagaagtttaatcaataatgtggatgtcaatgttaattaccctcacacacactagactagtcaggataggctaggttttgctgtaataacaaacaaccctaatatctcagggctcaccacagcaaagctttagtttttgattactctccaggatggtttggttatgccaggatctctgctaatactgaccactcttaaacccatgctgactggaagtgagttttgagatgtgcctctacagttgctccaggaggagaaagaacaaagtgaatcaagcacgagttcttaaaacttccccccggaaatgacacacatcatctccacaggcgcatcattggctagcaaatcacatggccaagtccaactccaaaagggcagggaagttaacctgccatgtgcctggaaaggggaaaagacagcatacagagcttaacacgtgtgatcctcacaactctacaagacaggagagccagaggtgattatttctatattaaatggggacaccaacaacagaaagacccccatgttataggtagagaacttgggtgtcctggctctgtgccaagttttcttttcaccatatcatcagaatctggagttcccagataccaactgcttgagagcaagctagcaaagagacacgaaagtcagtttaaaatatatcctggaaagtttgagttgtgataactgatggaatatcaaagttggataagatgatggaagtgctgcctggaaaccacttggactaggtgatatctaagtatttcaaggagacacaataagaatggagattttgcagaaaaaaaaaaaagaatggagattttgaaagagaaaaggaggtgaccggggcctccagtccccttgccaatcaactcagaggtgttttgcattcacagttttctatactgggtttcagcacaacattcatttgaagaaaatttccttcaatttaattatattaaaaatgaaaaccactgactgcagtccaagcactttgttttgcagatggagagagtgaggcttaaagaaaggagataacttccgcacgaggacagagtggcagggctggagccagtcatcaaatagacggggtctggactgagagttggaagcccaaggacctggtttcaacactctgctgtgctgccacaggcaagccactccacgtctctgaacctgtgtccttttctgtccagtgagcacagaatgtctgtcctgtcaaatgcggctagaaagcagacatagaaagataattttacattgagaagacttcaaatgagaataccaacaaatatttgtttctcactattaaattagtaacttaaacatctcatttctgatttctagccagcacgtggagaattggttcatgtgaagcagcatgtgtgctgcttactcagcctctttgaagaacaatttaaaaataaaaattaaaagccagctgggcgcggtggctcacgcctgtaatcccatcactttgggaggccgaggcgggcagatcgtgagttcagaagatcgagaccatcctggctaacatggtgaaaacccgtctctactaaaaatacaaaaaaaaaaaaaaatagcggggcatggtggtgggcgcctgtagtctcagctactcaggaggctgaggcaggagaatggcgtgaacccgggaggcagagcttacagtgagcccagattgtgccactgcactccagcctgggcgacagagtgagattccatctccaaaaaaaaaaaaaatcaaaagccactagaaatgttcatagcttttgatctaataattacagttccaggaattcagtctttgggggaaatcttaaacaccagaacctatgtatactaaaatgtccctcttaatattatttagaatgacaaatattgaaaaatgaatgaaatgtggagtaaaatgtgataaatccattgaaagttagactatggagaatataggaaaacataggcaaatgcttaggatacaatcaatattaagtgaagaaaccaaggttcaaattgattgtagctatataataagaaagggatacacatttaaaagacaacacagactaggtgtggtgactcatgcctgtaattttagcacttttggaagccgaggcaggaggatcccttgagtttgagaccagcctgggcaacatggtgagatcttgtctctataataaataaaaatgaaaaagactacatggatataatgggttattgttttattttctccttttctctattttataaactttctggtatgcaaatatattgattttattttaaaaaataagtacaataaaaatatttccaatatctgccctgctgtgagggttaccagcagaaacaaattgtacaactggtgtgaaagtattttgtcctcattaaaggtagtctgtggttaagtgatcactatgatcagtgttaaattatgtttggttccaacccactcactttcagttgaacactgctattctattccttatttttctggaattgaactaagagaacaagagggcagattctcacccaatttcatatttaattaagcttttaggacacatttctctcttgtaggtttgatcaactgaaatatactagaagcttatccttctgtagaacgaaatacaggagataattctttatggttacaatgtctttgagtaaacggacttgagtgagaaacataggcattcacagctctgtgaagaagcacctccaagaactttccccatcagggccagtgtattcatccgcactcagcagttgcttcctgaaatttgaaatgagtcaagatgctcagaatggcctccatagtgtggggcaaacagaaggagtttagcagcaagcttgttacagctcactggctcccagagcacggctgcccatccttccccggagccgcctcactccagacatgggctctgcttttcctccctgacccgccaatcactcttccttttgcttgcaagcagctgaacagctttatttgtgtttctcatcacagttttattttcacttcaataattctgttcaaaaattatccaaatacttggtttttgccatatgaataggcgagcccagaaaagaggaaaggcataaacaagtgtccgcttgtcatttacaccaaggtacagttcacactgtttcaaatactttacccaaacacagtctaagagattgaagcactgattttcacacacctacttaaaatttttaggaaaatggagcagatagcacacaaaccagtaagtcagctaactagtccacaaatatgcaccaacctacatgcccggtgctgtgccacaggctgtgtgacaatgcatgctcttcacctgctgacagtttgtagttcagcaaaaaaatgaaaaagtccatataagataaaaaataataatacagtagcactggcatccaaggacaagtcaaagtgtcagaaaagatggggctggaaggatggtggaaggctttctgaaagaggtgggaatggaggggtgtgggcagatgggaagagtttggctgaacagagaggatggggaacggataaaatgtaaggacaccctgcagaaacagaggtgggtgtaagcacaggaagtggaaggagctgctggggatagtatgcaagttaaatgaagaagctcaggagagtggaacggggcctaaatacccttgggaatctctttttcagatgaaatccctgacctcagcttatgtttgatgctaggagctgattcgtcataccaagaagcagtgggaggatagaggcactccagccttaaaagccaagagacaaggagcacccaggacgaagagaagcgtgactaccaaaacgcttgctggtgcaatgagaatctgtgtccttcaccagagctgtctcgaattatcttgaaattgcatccatcatccaggccatcttcctgcaggcaaaggggatagaagctttctgtagccctcaccctctccagcctcccagactcctgtcttcctcagggggaattaagctcgccagacacagcagaactagggagacttcagagaagtgaggtctctcaaccaaagaaagccctctgaaaaatgcctcttactctgacttaaatgaagagcgagtcgcataaaaccaaagctgaaatcagggatttcatctctgaaagaagtgctcaggactattttgacccacatttctattaagcccagtctcctttttgtttaaatttacacagcaaaacaaatccattaattttgctagtgatgaccaacagatcctcaaaacagaaagtgtttactgcagaagttttagagagaatttgtataacatgtttaaaacagtagggattaaatctaagttatctagaactccagacatttggaaagctcattcctacgtctgactcagggttaaagtgtggttccttcatgccaagctcggtgtctgctacaaatagtaagtcccatgagctatgaaagcttgggggtgagaaatgcgggtgatggcaataggaaatatcttggatcctattgttctttctggctacataggtcagagtcccagcaggaaatcatttatcccaaattttcctaataaataaatcactacttacagagatgtggagacagtggagagaacaaataaggaacattgaggtacccagagactagaaacagctgggagctgttgccagcccaaggacttcagaggccaaggggaggaattggtgttacctgagggcaagggacatagaagagggactgcccagaagatgctgtagatgtggggggcacagctgctgccaaagatatgcactggtcaaggaggaggctgggtaattatactggtcctttctctctcacaccctttgattctttgctagtagcttccactggtcaaatctaactagaagccagaaagaaggggactctcaggtaataatgtccacgagagtcagcctccagggcacagaacaggcagagactggagaaggataggtgtgcgggtgctaagagaataagcacatcactgttaggaaagctatttttaactcagattctacaaagattagtattcttattgccaaggagtcagcagaattttgctcagcagaactttgctcagaagcaggacacagaagacaagactcagactccagcattctctcaaagagacgagcgtgcacacatgcacatgggtctgcacacacagtttcaagatggattttcataatgaaagcagaaggaatataaaagttagcattctaaatatggaagaccttagcattcttttttcaccccaccccagaaaattggccactacaataataccctcagtcagaagatccaaacagcttttctgggaaatccaaccatccaaagagaaagaccttaagatatagacatagagatgcccaaccaaaatgacccagcctttaatggaagccactgctgttcactaaagtctaagcgcagaaagtatacctacacataggtttagagctctctatcaccattttggtcccccaactattaaacataaacagacagccaaagctcaccagacttttgagagaatacttctaatattcatgaaaaagaccaaaacagaaaaaggcaactgagataaaatagtacgaaaggagaggaaacttccaaaaaactataattaaacacaaacagatcaagaggagagaaacccttagagagcaaaagaggtatcttcagaaagagaaaatatgactgcaggggaaaaaactcaaaagatagaataaaggagaaacttgaggaaattgtccaggaaatagaacataaagaaatgggaagaaaagagaaaaaaattcaacagaccaaataataagaatcctcaaaggaaaaacagataatacagtgaaagtcataagtaaaatcaagcaaatcttagatctaaaggactcaagattctaatttgaaaaggtgctaccaacagcccagcacggcagataaaattagcccacatgaatgcacatcattatgaaatttcagaacactgaggcaaaagatcaaaaatttttccagaaagggagtaaaacaataaaagtcatatacaaagatcaagtctcagaatagtaaagaccttctcaaagccacactgaagaggaagacattggagaaatgccttcaaaacatggaaggtaagttattactttttttttttttttttttttgagatggaatctcactctgttgcccaggctggagtgcagtggcgccatctcggctcactccaacctccacctaccgggttcaagtgattctcctgcctccgcctcccaagtagctgggattacaggtacccgtcactacgcctggctaattcttgtatttttagtagagacagggtttcactatgttggctaggctggtctcaaactcctgacctcaagtgatccgcccaccttggccttccaaagtgctgggattacagtcatgggccactgcgcctggccgagggtaaattatttttaacctagaattctacgcttggctaaattattattaaaacatagaataaagctattttaattcatgcaagttctcaaaatttttacatttgatgcactcattctcaggacatgctctgataaaatgaagttaattgagaaaaatggaagcctttgtaaacagaagatgcaggcctggtgtggtggctcacgcctgtaatcccagcactttgggaggctgaggcaggtgcatcacctgaggtcaggagtttgagaccagcctggccaacatggtgaaaccctgtgtctactgaaaatacaaaaactagccaagtgtggtggtgggcacctgtaatcctagctactcaggaggcagaggcaggagaacctgggaggcggaggttgcagtgaaccgagattgtgccatcccactccagcctgagcgataagagcgaaactccatctcaaaacaaacaaacaaaaaacaaaatatgcaacacaaaggggaagcggaggaaatccccgaggtgtcagatccactccaagagtgcactggcaggagaggcagctcatccagaggaaagcaggtggagggctcaggaagagatgcctcataaagatggaatggatagactctccactgtgttaaacataccaagaggagactatacaactaaaagtgagttgggggataatttggttataaccaaattatagcttaaaaaatgttaaaaagtagtattaattctagaaaattaatgagttatgtaccaaaagaaaaataatcaagatgccacatagtttagctgtgcaccaggcttaatcgtcatttaatgtaaacactgaatggcgacaaaccaaaaattagatctccatagcgacagaatggaaaataagacatatgcaaagatacagtgataaaaaggaaacacgtggaagacagctgaattatcatctttgatagtgagaattaaatagataatactaagtctgagaaattaatataagcattttatttagagatagggagttaaacactcaaagagtccatgaaaagagttaccaggtcttgcctctgtgtaacaggagtaaaaatgagatgtctggtgaatttcttatttaaaaacaagcctcgtagaactatttgactctaaacattgtgcagaaacaccttggaaaaaaattaaacctactttttaaaaatgggtttaagtaaatagtcagacaaaccccaattaagggacattccacaaaaagattggtctggactcctcaaaaataccagttgtacaattattatgcctgaattgtaaactatttcctttaaatatcaattaataaaactcaaagaaaggctgaaaaattgctccagattaaagtaaactaaagaaacatgagaactaaatgtcatatatgatcctggactagatcctggaatagaaaaaaaaggtgatttaaaaaacataattgagacaattcaatgtgacattttctgaattttataactttacaggaattaggtaaaagaatgttcttgctaaaaaaaaaatacacactaaaggtgaagaatgatgttatatgaatttactcaccgtttaaatatatatggcatatgtcaggcactgtatggtttatatcccatgcattgcctctgtaaagtattacagcaactgcattaagtactttctacagctacttctatttcacagaaggggaaaatgaatcttagagaagctcagagaaacaggaagtgacagagccaagactagaaggtgaatctatttccccattttctccattatcctttttcatttttaatgaactttcgtttttaaaacaattttagatttacagaaaaattgagaagatagggatgataaaccaagttacattagcaaaaatggtgaaataggagttccaagcactccatctcacagaaatgtaaatttaaacaaccatgcgaatgagaaaataacttcacaaaaatgaaggaattcaagtgtaaagattatagcacctgggtgaagcaaagacataagaaaagatgcatgaaggtgagaaggataggttcatatcacttgtgtcaaccctccccaaagcctgaacagcacaacacagagatggacgccatccaaatgggaaagaagtgagcatctgacttcacctccacatcaggcccgcccagtagacccgaggaccaggtcagctgcctccacatcaggcctgcccagtggaccctgggaccaggtcagcttccgtggaactaggctacaggccagccccaggagaaccaacctccaagcccatcctagcaccaaaccaaaccctgcaaagccaggctataccatgccctgtgaaccctgcaccaggccagccctcagatccagtctccaagcctgtcactatggactcaggccccagatccaccccagcaccaggccaccattgtccccggacccaggccagccccatagacccaggttccaagtgcaccttctcagatcaaggctccagactcacccgcactgactctggcaccaggctaggccccagagaccttggatacaggaccactccaatagattcccatgctgagctggcttctgaagacccaggccctaggtctaccctgcagactcaggatccaggcccacccgaattccaggccagtccccacagacccaagctccaggccaaccccagcagacccaggcttcaggctgccccaccccaacagtcccagacaccaggctagtacctacagacccaggctttaaggcctgcttctatagtcccaggcaccaagcccactgccacagattcaggatccagactcaatcctgcagacccggtagccaggcccatcccagtgtactctagcactaggccaaataccgagaacacagaccaacacctaaaaaccgaggcaccgttactgctcacatgctgacccaggcactagggcagactgctcaaggactccatcagcaagcccaaccatggaccacatcaactgtcctatccagaactctggacaggctgattagtgaagaacttttcctgctgaagccagtctgtaaacactggaagaggtgacttcttgaaatgtgcagataccaatgcaaggccacaacaatcacaaataatcaagaaaacatgacaccaccaaagcaacaaaatagagcaagagtaaccaaacctaaagaaatgaagacatatgaactgctagaaaagtttcaaaattatcacattttagaagcttggtaagctacaagaataacagacaactaaacaaagtcacacaaacaatacatgaaaaaatttctaatttcaacaagagacagaaacaaaaaaatactttggaactgaagatcacaatgactaaacttttgctgtcaagaatcccacagttggccaggcacaatggctcacgcctgtaatcccagcactttaggaggccaaggcgggtggatcatgaggtcaggaggtcaagaccagcctggacaagatggtgaaacacagtctctactaaaactacaaaaattagccaggcacagtggcaggtgcctgtaatcccagctgctcgggaggctgaagcaggagaatcgcttgaacctgggcggcagaggtcgtagtgagccaagatcacaccactgcactccagcctgggccacagagtgagactctgtctcaaaaatgaaaagaaaaagaaaaagaatcccacagtcatcacaaatgccgagcccagctgacatagctgcctggaatgtacactgcacactgcagtgttccttccaaagatggagccacttctgtgtctcttccctgggcctggagctgctactgtgttgaatccccacccccagctactactgtgttgaatcaccacccccaagtcattaccacacccaatgatctggaatgaaaacaccacagcgcctcaccatatgtgaccaagttgtgctgccctgcacctcactctggggcctgtctctcggctgctgtctgccatcactggtccatgctactgctgctctacccatcccctggaaactgaatcataactttgaactaccattatgaagccccctgggtcatgagtcacagctctgactagccatcactaggaccttgctgcagcttctctgcatcccatgcccacgggtcagagttgtgactgcaacctgccatccactcggctgcactactgctgtgccttacccttcggtcccagaccaccactaagccctgtcaccccatggcctgtgacactgctacatcttggttcaccagtgctgagtcaccatggcatgctttggagacaaagactccatggacaatcttcacgcacctatgcatcagacactgttcccagttccacagaaaatatgccactgccacaggccctgggtgccagggtagttctgtatgtctctgagcagtaaacccaagaaagagtgggatgatatattcaaacactgaaggaaaaattgccaaccacaaatactttatatggcaaaattatccttcagaaatgaaagaaaggtagactttcctagacaaacaaatgtgatattgagagattatgaccactagatgtacctttcaagaaagtctagagttttcaagctaaaacaaaaggacacaaattagtaacttgaaaacatatgaaagtataaagtttactggtaaatgtaaatttattgtaaaaataagaataatactgtaatagaagcatgaaattcacttttaattattttcttaaaagacaaaaatatttaaaataactgtagccacaatattctgataacagatacacaatataaaatgatgtaaattgtaacatcaacaacataaaatataatggagactagtaaaaacatagagctttgtatgcaactgaggttaaattatcaacttaaaatagactgttacaactataagatgttttatgtaagcgttattgtaatccaaagaagatactgtactagatacacaaaagataaaggaatcaaaaccataagggataatgtcatcaaacgacaaagacagcaaaaaagtatgaaagaaactacaaaacagtcagaaaacaattaaaaaaatggcaacagtaagtccttacctatcaataattatctttaaattaagtgcattaaattctccaattaaatgacatagagtggctgaatggataaactaacaagatccaactatatgctctctacaggagacacaatttatcattaaggatacatacaggctgaaagcaaagggatgataaaacatactatgcaagtagaaattttaaaagagcagaggtggttatataagacaaaatagactttaactcaaaaacggtcacaacagacctagaagatcattatataatgatagcatggtcagttcatcaacaggatataacaattgtaaatatttaagcactcaacattggagcacctaaatcaataaatcaaatattaacagaactgaaagtaggaatagaaaacaatacaataatcaaaggagaactcaataccccactctcaacaatggatagatcatccagacagaaaatcaataaagaacttcaacaacactatagatcaaatatacctaacagacatactcagaacttcccacccaacagtagcagaatacattcttgttgagcacacatggaacattctccaggacagatcatatgttaggccacaaaacaaatcttaccaaatttaataagtctgaattcacactaagtatcttttctgaagtaatggtatgaaaccagaacacaataacagaagaaaaactggaaaatttacaaatctgtggaaattaagtaacatacttctgaaaatcagtgagtcaaaggagaaattaaaagaaaatgcaaaaactatcttgagataagtgaaaatggaaacacaacatgccaaaatatacaagggacacagcaacggcacttagagggaagtttacggtgactaacacccacttgaagaaagaagatacatttcaaattaacaacccaacgttatacctcaaggaattagagaacaaagaaaagctaagcccaaggtaagcaaaaggaaagaaataataaaagtcaaagcagaaataaaggaaatgaagactagaaaaataacaggccaatgaaagtaagagatcggtttttgaaaagataaacacaattgacaaaacgttagctagactgaggaaaaaaagacaaaattataaataaatataagcatatataatataaatataaatatatataatttattttatataaaatatatatttatatgtatatatatttatatataatatatttatattttacatgttatataaatatatttatattttataaatatataatatataatataaatttatataaatatataaaactgatacgacagaaatacaaaggatcaaaacaggctgctatgaataattatatgtcaacaaattggataacctaaaacaatggataaattcccagaaacatataagtaatcaagactgaatcatgaaaaaaaaaatcagaacagaccaacagtaagtaaaagataaatcagtaattaatacgtttccagcacagaaaagcccaggaccagatgacttcactgcagaattctaccaaacacttaaagaataattaacaccaatctttctcaaacttttccaaaacactggggaggtgggaacacttacgtatacttttaatgaggccagcattaccttgatagcaatgccagacaaggacattacaaaaaaaaagaaaattagaagccaatattcctgcaagaaaaagggggggagtttgtctgtcccttccatcacgtaaaaacacagggaaaaagcaccatgtatgaggaagaaggcccttaggagacaacaaattcttctggtaccttggtcttggacttcccatcctctagaacaagggtccccaacctccaggccatagaccagtactggtcacaaagcaggaggtgagtggagggcaattgagcaaagctgagctctgcctcctgtcagatcaatggcagcattagattctcataggagtgtgaaccctatcgtgaactgtgcatgtgcgggatttaggttgcatgctcctaatgagaatctaatgcctgatgacctgtcactgtctcccatcacctctagatgggaccatctagttgcaggaaaataagctcaaggctcccactgattctacattatggtgactatgtaataataacagaaatagaatgcactataaatgtaatgcacttgaattatcccaaaaccttcccctccctagtctgtggaaaaatcgtcttccacgaaaccagtccctggtgccaaaaaggtttggggactactgctccagaactgtaggaaataaatttctgatgtttataagttgcccagtctcaaatattttgttatagcagcccaaatgaactaagatagacttcaatcaacatttcttcaaaaaagacatacaaatggcagcagatatgtgaaaagataaccaacatcactaatcatcaaggaaatgtaaatcaaaaccacaatgatatgtcaccacacacctgtttaaatgactattatcaaaaagacaagtattggttaaccccaggcacattgcctatgagttagccctactttggaaaaaaaaaaaaagaaaagataagtgttgatgaggatatcgagaaaaaaggaacctttgtgcactgttggtagaaatgtaaattggcacagacacaagggaaaatgatatggagtttccacaaaaaaaaaaaattgctaatagaactaccatatgatccagcaatcccatgtctaggtacatatactaaggcattgatcagaatcttgaagatatattagcacttataggttctttgcagcactcttcacaatagctgagacatgaaaacaatgtaaattttcatcaatggaagaatgaataaagaaaaaatgtggtatttacattcaatgaaatattattcagtcttaacaaagaaagaaatcttgccattggtaatacatgggcaaacctgaagcacattatgctatttgaaataagccaggcaaaaaaggacaaacactacatgatcccacttatataagtaatctaaaatagccaagctcacagaagtagagagtagaatgacggttgccaggttggggtggaggggaaatggggaagtgttggtcaaaggatacaaagttgcagttatgcatcatgagtaagtcttggatttctattgcacagcatcgtacctataggttaacaattctgggccgggcacggtggctcacacctgtaatcccaacactttaggaggctgaggtggacggatcatgaggtcaggagctcgagaccagcctggccaacatggtgaaaccccgtctctactaaaaatacaaaaagtagccaggtgtggtggcacatgcctgtaatcccagctactcgggaggctgaggcaggagaatagcttgaacctgggaggcagagattgcagtgagccaagatcccaccactgcactccagcctgggacagagctagactccatctcaaaaaaaaaaaaaaatctgtattatatagctaaaagtttgctaagagtttagatttcaattccagcgttcttattaccaaaaatgaataaagaaagagagagggagatatgttttggaggtgatgtgtatatttatgaccactgattgtatcaatagtttcatgggtatatacttatcaaaaaaaaaacttgcatacattaaatgtgtgtggctttttgtatgtcagtaataataaagtagtttgtttttaatgtagcaaacaaaatccagcagcatattaaaagattatataccatgaccaagtgggatttatcccaggaatgcaaggttagtggtttgatgtattaaaatcaaacaatgtaacgcaccagtaggaggaaggcaaaacacatgatcatctcaatggatgtatgcattagtctgcttgcactgctgtaacagagcaccacagcctgggtggcttaagcagcagaaacatgtttcccacaactctagaggctggaagtcccaggatgacagggctggcagagttggtttccggtgaggcctttcttcctggcctgcatttgccactttctcactgaatcctcatgtggcctttcctcagagcatgtgcacttccggtgtcttctctgctttttataaagacacaaatcctattggagtagggccccattcttatgacctcatttaaccttacttactctcttaaaggctctacctccaaatatggttgcattgagggttagagcttcagactatacattgtgggcgtgagggggagagcaactaaatccatagtgatgcagaaaaaatgtttgatgaaagtcagtctccttcactatgagaatctttcacaagccagaaacaaaaggaaacttcctcaaccatataaagggaatctatgagaaactcacagctaacatcatacttaatggtaaaagactgtaaaagattctgtgatcaggaataagacaaagctatgtgttcttgccacttctattcagcattgtgctataagttctagccaaggcaagaaggaaatgaaataaaaaaaagaaaggcattcaaattggaaaggaggaagtaaagtatctatgttaaccgatgatataattttatatgtagaaaattctagagactccatatgaaaactattagagccaataaactcagcaaagcacccaagttgcaacatcaacatccaaaatccagcttatttctacacacttgcaatgaataagccaaaatttaaggtaagaagacaattccattcattatgatagcatccaaaagagtaaaatactagaaataaatttaaccaagaaactgcgagatttatacactgaaaacattcaaaacattattaaaataatcaaagaaaatcctttaaaactggaaagacatcccttcttcacagattgaaagagctattgtcaagatggcaatactactcgagtctatcgatgcaatttctatcaaaatttcaacttttgtttgcagaaatagacaagctgattcttaaaagtatatgaaactgacagtaagcccaaatagtcaaaataatcttgcaaaagaagaaaaaaattggaggactcatacattccaatttcagaacttaccttaaggctataataattaaaaagcatgtagaataaagaataaaattgttattttacctcacagaaatgtatgtttaaaaattaattcaaaatggatcaaagatctaaatataagctaaaactctgaaacccctagaataaaatataggagtacattttcatgaccttgaatttagtgataaatttttaggcatgataccaaaaatacaacaacaaaagcaaagcagataaatctggcatgttaaaaattaaagatttttgtacattgaaaaataatatcaataaaatgaaatgaaaacctacagaattaagcaaaatatttacaaatcatgtgtctgataaggaattagtacacagaataaagagctcttacaactcaatgacaacaaaaaaacaacccaatttttaaatggccaacaaacttgaatagatatttctccaaagaaaatacacatgtggtcaataagcacatgaagagatgtctcacttaacaccatgaggcatgaggaaaatgcatatcaaaaccacaagacaccactttccacccactaggttggctctaatccagaaaagaaaggaaaggaaaggcaaggggaggctaggggaggggaggggagggggaacaattgctgggaaggttgtggagaaactggagccttcatacactgctggtgggaatgtaaaatgctgcagctgctgtgaacggcttggcagttcttcacaaagtggaacatggaattaccatttgaccgaacaattccactcttaggtgtacaccaaagagaactaaaaacgtatgatcacacaataacttgtacatgaatgctcattcatagcagcattattcagattatactaaatgtggaaatcacccaaatgtccatgaactgaggaatgggtaaacaaaatgcggtgtatctatacaatggaatattatttaagcattatacaatgtttaaaataagcaaggtattaaattctcatgtatattacaacacaaataagcctcactgaaagaagccagatattaaaaagccacatatttacaattccatatatatgaaatatccaaaatatgcaaacccgttgaaccagaaggcatattagtggttgtcaggactctgatggttgtttccttggaagatgacgtgggagatgagatgaactcttacacattgtcattcaccactttttgcagtaaggaccatttgttttttcttccttttttacaaagagactcaggagaaggctataaaccaggcagcgaatcatgcctcagcctcctgtcactattttaaacaacagctttgcaaacaaaactagaggttgagggtccactcactccacagcagcccacataaatgcctgggatgcaccatctcactcctgcagatgatttattgacttttttcatcatttgaataaatgactatatcacaagggctcctgaaaggttgctgattaaagtaccctctattgttaaaaacataattaaataatgtttggatttatcactttctttgtaaagatgagacataaaagatattagaatctcaaatgacacagttagaaagtcatccagttaatagtactctttaattatcacagctagccagcactgcagcatgtctgcaatgctttgttatttatggacattaaactgcaaatcaagttgtgaagctctcccctcttataagtagtacaaagactgttaaacaaaacagaatttaaaacagcatggagttataaatagcctgctgtttggtatagtttgtcaatctgttaccacttaacagctctctaattagcactcacttttgatactactgttcctaaaatgtttatgttggaagttacaaattactgtctaattataccggctactttgttttgcataaacaataaataaaatcccatttatgccataaaaatacatgcactgtcatcactttttctataggatgagtaataaactttgctagctttacactgaaaatcagcagtgaacaactttaattaaatttgacagtgtgaggattcatgactttacttctttaaggggtgaattgcttgcaagcaggaaaagtttgcacagaatcaaaagataccatcccagtagaataacaaactcagcatctaaattgcacattccagaaaaaaactttttttcaaattttcagctttttatcttttgccctgcaccaaggaaattggaatatttgtgcttctacagactcagtctgggtgaatcctaaaaatcagtgctagggagaatcagagcatgggagaaacctctatttgaggaaaaaataatcaaggcaatgcttttgataaaattcatttcttggtagatttacttaagttcttcccatgtcatgatgtctccttgtgaaataagccaaattaatcatcaaaaccaatcattctatcattgagaattcctcattcaaactctcctgttgtttatgtgaatgtggatcatattatttgttcaaaaaattcactgtttttactatgaaagagagggagtcgtcataggaggcttatacatcttacttcactgacagctagcatggtggcatgatttgctttaaccagtggaatgtgagcagccacgtctgaacaaaattttgagagccatcacgtggtctgtcatggcacatgaagccatgcatgtactagataaaggttgctccttctgtcgtggtcctggaatgaattgaacagagccacatcaacccatgatacatgtgagcttacaatgatgaaatggtggaagttatttgtgcctatagcataacttagcctaggctgactgatacattcacttaactgctatgggctacgttagcatttagtaaacatccaataaataatagatgaataaactaatagatagatggaatgaaagctgtaaaaattattacttaaattatatctgcatatgcaaatgcaggttctccatgtaacagaaaattattttacattacattgagaccagctatattgtctaaacacaaggcctacacatctatattttacccaaaaagtgaaagttgatccacacctgtattctctgattacagatacaaaatttcagctttttatcttttgccctgcaccaaggaaattggaatatttgtgcttctacaaactcagtctgggtgaaccctaaaaatcagtgctagggagaatcagagcatgggagaaacctctatttcaggaaaaaataatcaaggcaatgcttttgatgaaattcatttcaatacaaaaaattgtatcctatgtcagaggccggcttgttagtttcctttataacctggtcagtggtgacagtcttttcctaacaccctgtacaatcgttgcaatacatctccaacacaacagcactgtgcagtctcatcaatgtgtttcacacactctcttatgttggagacagggccaagtggcagctccaacacatctgcacaatgagggtcatttgaatttggaaaataatcagggcataatatagggcatagctgcctcccacataagcagtctcctggttcagcctgaaaacacaccattttggatttgcttgtatcctaatcgcactgacttatgtaagtacataaaatattcataccccatataaaatctcaaatcgcaatgtccctagcaatcttcactaagtgtcacatgttgtggaaattattcactctggtctgtcagtgttggcgaactctaccttgctggtagagttttgctggaatattaaatttcataactgatatgatttcatatactccaagtctgccacacaagccataactgagaccaatttctcatgaaaccaaaagccctcagcaaagcaaagcactgatcaacactgcatctctggctggacttgtctcagcattctctgcacggtgggcatagagcactgtagaaacaaggagccctttcttgctggtagcaggatgtgcagacaggcaagaccagctgtgagccatgatctgtcattctccctaaaacaagtttcaatatttcacagggaagggacaacattttttttctatccaaaatagtcatcctttcttctattactcccttacttataaaccacaattactgtggttgaagggatgaagtcacagtcagtcctggccaatagaaacttaaaggtcaaggtttccatgagtgcagggcaagtacagctggaggtacccacaaaatgtttaaacagtcaaattgccccttgtgaaggaactaaccttccttttctcccttcaacagatgcacagtgagctcccactatgttccaggcctctgtgaggtgctcaggtaaagcaaggagcaaagctgacatcgttcctgatgtcacaaacctgcaagttgagctttttctttactgcaagaggcaagtaaagaaatcttcacaaccacgagtgaacagcattgcaatagagaaatcacagggtgctgtggaagtgagagagcagctcttcaccttgtctataggacgggtcaggaaaggaaggcttccttggattagtctaaaacataacggatggctccaaggtagccaggtaaagagaaaaatgaaaggaagcttccagcaggagaaagagcaagtgtgatggactagagatgagaatgaccacgaggccaggagaaactgcagaagactgatggagaacgaaaccaagaagagaaatcggggaactgagcctgcagggcagtcaacaaagatctttgaccaaatgttgaagactttggggtatatcctgaaggcgatgaggagccatggaaggagtttcagcaataatcagatttacatgttaatcacatacctttggctacagtgtgagggacagcaggtgtgagtgtggaaagtctagttagggtgctgtattagttgtcattgccatgtgaggaattattccaaaacgtagtgccttagaacagcagcatttattgtctgtctcacggcttctatgggtcaggaatccgggggcaaatttcctggatcctccggctcagtcaccctcaaggctgccaagtgtcatccaggactgcagtcacctcaaggctccactggaaaaggatttgcttctaaattcaatcatggcagtttgcagctgttgggctaaaggcctcagtatctcactgactgctgatcagaggccatatgggagctgacagcacagctgcctatgacctcagattaaacaaggagaggagccagagggagagttggtgagcaagatggaagtcatggtctttcatagtctagcttcagaagttgcatcttgttacttttgccgtattctgttcgtcaggaacaagtcaccacacccaaaccaaactcaagggggagaatatgtcatgtgggcatgaattccaggagacagggatcaaagtgagccatctaaaatgctgcaaaccataagagctattaaaataactcatgcatgagatgctgatggcctatatgagggtagcaatagtagaaagacagaagtgaacaaatgataaatgaatcaaaaggatttggacactggagttagaagacggtagaagtcaagaatgattctcaggttctggtttgagaaagtaggaggatgattatgctacttgctgaaatgtaaacactcaaggagaaataaatttttggaaagaaattttatgcatcttgttttgtaaatattcactttgtggtgcttgtgaaacactgaagcagaattgtcaaataagttgttatctttccaggtctgatttggaacaagagaactatttgtttaaatgtatatattaaaatgaattctactcacttgttaatctggttgtacaaagccatggatgaatgaatggatagatggatggatggatggatggatggatggatggatggacggacagatggacagacggatggatggataaatggatggatagatggatggatagatgaatagatggacaaatggatggatggatgaggtgatgggtggcccatctggtccaaatatgaaaagaagatcatagcagtagtatccatcattccgtaattatctagtcagaaaagatatagatcagcccagaaaaatttttctccggttgcaatgtattgagattgtacaaatccttctgtccttcctttggatatgacacattgactatgacaaccacgttatggagctggtgctcaagccaaattttaagttgtcaagaatgtgaaagcacctgaaatgcaaaggacttgtatgacagctttcagttgcagatgtctctgaccaataagagtaaacaggataggctcagaggattggagttgcaaaatcaagggccatttgccttccgagatccagaaaggtctctcaggattaattgattttgggatatgaagtctggtctcactaaaaaaatgcaggtgtatgacgggaatcagttaactgtgttttagttttattgttcaatgacatctgtttgttgtagcctcccatgaatgttcatgagacataactctgaaactttattttatgacaaagccaaaagatggcaaggcttttcagaaaagccttctgcgaaaacaggtagaattatcttgagcgaacagatcagtcctagcaaatcctggtcttattcatattaatgatggtaggccaggcgtggcgactcatacttgtaaccccagtgctttgggaggctgaggcaggcagaatacatgaggccaggagttccaggccagcctgtaaacatggtgaagccccatctctactaaaaatacaaatattagccagatgtggtggtgcacatctgtagtcccagctactcaggaggctgaggcaggaaaatcgattgaacttgggaggaaaagtttacagtgagctgagatcgtgccactgcagtccagcctgggtgacagagtgcgactctgtctcaaaaaaacaaaacaacaaccaaccaaccaaattaatgatggggggataaaaaaggaacagcatgttggaaacaaatgttcctgggtatccctccactaattcacacatagaccaaaatcctggatgtcattaatgtgcaagatggtagcagcttctttggccacactcctcctttcaggagctctggaaacaaagccacatccttttattcccatctacaaaaccaaaccaacagtcctcctttagttttttcatttcaaggttgtctataaatctttgctaaggagaattctggtgaaactgtcaatgaaggcctgactgaaaatcacaataatttcttctattaactaggggaaaaccagctattcattacggatggttgctaattaattttctaggtgcaattgttaattataacaagaatatattatacctgctgaaggtctggttgaagataaagtagtcaccagaatcctatgaagaacagcaaaatattaataattattaattattaattaatttagttaagtgatcaactaaaaatcagtattacatgtctattgagaatttacaatgtgccaggcatggctctaagcagtttacattgaactttacaaccccaccataggggtgggtattttgtacacaaggaagcagatgtactaaaggatgaagcagcttgcccaaggtgacagaaagagaaactgatttattatgggaggtagggtagaacacttcagagcactgtattttaacctttgtgttcattacaaaactcattccatacaacagtcctgcaaggcaggcagtggaaccatctcgtcttatagatttgaagctgaggctctgagaaaagaaatgactttcctaaagtcatgccgcagcaagagtgggatgcaactcaaacccagcatgaaataattcacagtccatgaccccagctgctggggatagtacatgaatggcaaaataaccattttccaacataagaggataagttctgtttaaggaagtttcaaacattccacaaaactcagcagtgaaagatgagcaagtaaagggaaaactaaagtcactctacatgaagaatcctttaagaagagaaagacgtatcacagtggtgtgagcacctcatcactgatagagttgggcccagcctgactggccttatgtggaggctgatgaaggagggattcttacatcaagaagaggttcagccatgaacctgaggtcctctccaaccccaggactccataattcacatagataaagctcctgtttctttaattcctgggagttttgttctttgtattttgcatttcttactgtaaagcgaaaaaaaaaaagcagattgggaacacaaattttcttaattttctaattttttatttttcagggacggggtcttgctctgtcactcaagctgcagtacagtggcacgatcacagctcactgcagcctggaatttctggactcaagaaatcctcctgcctcagcctccagagtagttgggggtacaggtacatgttaccataccagagtaatttttattttttaatttttttgtagagacggggtctggctatgttacccaggctggtcttgaagtcctggccccaagcaatcctgctgctttgacctcccaaactactgagattacaggaatgagccaccatgcatggcaaattttttttttccatttcaatcatccaacagaattagagatcaggttaggtgatatgaaaaatataaagaactaaacttcagtggttgaatctctaagaagaaaaacaagccctaacattagtaagagtcacatttgaatttagcagggatattttatttttcacctgccactgaagtgatctgtgtggcagagacagacacattgagctgtgagcagcatgggtggatggttcaatgcagactggatgtccttgggttttaggttcggtacttgctttagataaatttctttaaagatttttgtaaatttgactcaaggagatcatgcaataggaattcttttgctgagaccttggatgttagacacttggctcacagatcctaattcagaatgtaaaccacccaagtgctgtcagcctattcagttctgtgacatgagaatgctgtgctttgaacaccatgcttctttcttttctaagagcaagcttctttagcctgccaaactcatgaaacagattttcagcaaagaataaaagcagaaaataaaagaagttggcaatttgcacgtgttcagctcagtctccctctcttaccctatgcaggctgaacttccatgtttctggacacattggctcagggacataacactgcacttgagaaagatgcaatcctcagaagccactaaatagagacccttgtcatccatctaccaagtctatcaaccttgcagcatcactgcctcctctctttctgtcctcgtacaattgaggaaggtccttccacatctgtgcgaaaggcccactgctctgcttgagctgtgcacctcaaccccttcatcctcatgagggaccccactgactctcttgttctctgcccctcctgtatcttcaccaaccccttcatctttgtatatattctgttaacctgcaaaatacttcagtatcttctacctttaaaagaagaaactgtctacctcacacactccttcagagtctgttctatcctttccctcctcttcacagccagtcttcaaaaatatttgagttgtctacctacccacctctacctcctcccactcccattctctcctgaatccaccctgaattggcttcatcctcatgtctccatccaaagagctcttatcatgggcacaagaagaccatgtttctaactcctatgaccttttcttttttctttctttcttctttctttctttttctttctttctttctttctttctttctttctttctttctttctttctttctttctttctttctttcttatttctttctttctttctttctctctttctctctttcttctctttcttctttcttctctttctctctttctttctttcattatttttttttgacagagtcttgctctgtccaccaggctggagtgtgtgatcatggcttactgcagcctcaacctcctcatctcaagcaattctcccatctcagtctcctgagtagctgagactacaggcatgagccaccatgctcggttgattttttatctgttgtacagaaggtgtctttccatgtttcccaggctggtctggaactcgtgagctcaagtgagccttccaaagcgttgggattacaggcatgagttaccactcctagaccagtggcaagatttcaatccccgcttcacctggtctcttgaaagcatttgccatttttattcaaatgccttctattcctggcttctggctttccttggacctttcagtctgtgttcctggaacaccaccttcctcaccctcctttacatatagaagtgcctcccacacgtagactctctagtatctttgctgaattaattgacttgaggccatcctggagaatggtgcagccagtgatggagcaaaacacaaaactcactagtgtaagcttgggagtcagatctgggttcacggcccagctttcttcttaccaattctgtgaccttgagccgctactctctttccttatctctgaaagagagctaaatgataactataataggatttttctgagaatttaattaacactagaattaaaatttcataagggcagagatcttcatcttttttactcaatcaataatccatatcacctgcattctagaggtgttcagcaaataatacctgcacaccaaatctagctctctgcctgtttttgtgtggccccaaagctaagaatggtttttacatttttaaacagttggtgaggaaatgaagattatgtgatagagtcagtgtgtagcccacaaagtctaagatatttactacccacccttcacagaaaaagttgctgtaaatcctgacagaagttagatattcaaaaactattaaatgaatgagtgaatgaataaagtatgtgcgcatctgaagcactgagcagtgaatgcatggagtgtatgccactagctaatgtattgagtgctttcccaaaggacatgctgccatcatcatcactatcgcacacgtggaacttctccagaggaagaccactccacggctcccgatacttgatacttgtcagacaacctgctggaagatgaaatattcggaatacctcttggtctttctaatatcaaaccactcacttgatgctgctttaaaaaaaaactgtttactaaattgagaggttgttgtagttattttatatatttgacgaaaaaatatattttatgaataatttatttcaatttcactgctagtgactcaagcatgatgatgccttcttttttttttttttttttttttttttgagatggagtctcactctgttgcccaggctagagtgcagtggcatgatctcggctcattgaaacctctgcctcccaggttcaagtgattttcctgcctcagcctcccgagtagctgtgattacagacatgcaccaccacacccagataatttttgtatttttagtagagacagcttttcaccatgttggtcaggctgctctcgaactcctgacctcaggtgatccacaggccttggacctccaaagtgctgggattacaggggtggatgtccttactcttaagaacaatggtttctatgcactcaggaccttctgataacttgtttcaggcaaaagaaacccaaatgtgatggatggacatatatgatttttgatacactgcatccattctctgttctttggataatttttccctgttctcttgtaggaaatcaccctttcccactcccagtccatgaatgtctggtgggactgactctacccttgactgcaggagagggcatgggacacaggactgaccagccagtaagtcccattcctatggacatgaaaattggttaaagaacaggcatggcacgttcggagtcagagagagacaatgagactttagtgggccctttgggaagaaaagcatactctcttttccaccaggcttaaactggaaacaatgagggatttgagctactggcagtcatctaacaagtggagtttgttcttagagccaaaagagaagataatagccactgaatgaagagaacttgagcccagtgccttcatgggagcccctggatcaagagttcacctaactctagtcttttcagtcatcatgtgaccaatagatttcaacttcagccaaagccagggtgagttagagctgtttgctttagaggaataaaaaccaaatgatgcacctgtccagttcatcactttccattccatgcttcaagttagtcacccaaataagagaagcaggtagcttttgatgaagcaccatcaggaagcagccattccctcaagaaacatggtactgaaatcatcatgtcagacactccatgtctgtaagaggcctgctgcatgatcttttgagacagaatggcagaattttaaagacagatggaaccttaaagaagaccatatatttaggagattgaaaatccaaaagcacgcaaagccaagaaggaaatgtgattgagtgaagggatcaggaatgagagagcagcaacacaggtaccgtgaaaaatggcaaatgacactcagcctcagggaccaggagcgggaggcggtggtgggcacagggctgcctggggggcacccattcgcctacctgagcagcctctgttcagtgacagctgaccatgtcgaggctcaaagatgcaagattctatgtgaaagctatctttattttctcatattttaagcaatttttatttggttctattatttgtttattcatttcaatagctttagaggtacaagtggtttttttgtcacgtggatgaattctatagcagtgaagtctgagcttatagtatactgcacccatcacccaaatagtgtacattgtacccaataggtgatttttcatccctcatcctcctcccatgatccctcttttctgagtctccaatgttcattatacctctctgtttgcctttgcatacccatagcttagttccttcatataagtgaaaaatgtggtatttgttatttttattccagagtaaatttacttaaaataatggcctccagcttcacccaagttgctacaaaagacattattttgttatatttaatggctgaacagtattccatggtgtatatgtgccatgtgttcttgatccactcatcagttgatgggcacttaggttggttctgtatctttgtggttgtaaattgtgcagtggtaaacatacaactgcaggtgtctttttcacacaatgacttattttcctttttgagatgagggtgaaatgagagaatctctaaactcagtttctctgaaactcaggtctcctcaggctcatggcatgcactgttgtgacattataaaatatgcagggttggtctttgatatgtcttgtttatggtttgttttgccccaccaagtctcaagttaaaatttgatccccagtgttggaggtgaggcctggtgggagggtttgggcagtggagatggattcctcatgaatggcttgatgcccttcttgcaggagtaaatgggtcctcactcttcattcccaagagcactggttgttgacaagagctggcccctcctgctagccctcttacttccttctctcaccatgtgatcgctccacacaccacctcccctccatcttccactgttttcatctgaggccctcatagaagcagatgctggcaccatgcttgtacagcctgcagaatcatgaaccaaataaacctcttttctttataaattacccatcctcatgtattcccttatggcaacacaatcagactaagaaaaatcttcaaccctgtttcctagcatatgacccctaaatccttaatatttccaaagtgatgtctcttgtataccaatgaatttgctgatggctggcagccctaggtagcttcaggatgggtgtggtcaatggaaagaccgaggcacgactagacagtttgggattttcagccccactcccaacctccagggaggagagagaggctgaagaataagttgatcaccaataatttcttcaatcatgcctctgtaatgaagcatccataaaaaaccaaaaagactaagttcagagagcttccagagagttgaacatgtgaaggttcttagagagtggtgcactagtgagggaatgggagctccatgccccttcccccatgtatcccatatgaatctgtttagctgcatcttctgtaatattctttaaaataagctgataaacgagtgtttccctgacttctgcaagtcactctagcaaactaatcaaacccaaagaggggtccacaaaaaccctgacttatagctgggctgtcagaagcacaggcaaaataacctggggcttgtacctgggtttggaggcaggggctgtcttgtggtacagagccctcctcaccctgtggaacctgatgctctcttcagctaggctgtgtcagaactgaattgaatcagaggatacccagctggtgtctactgcaaactgactgcttgcgtggtatgtatggtgagggaaccttcacatatttggtcgtagaaatcttctgtgttgattgttgtgagtgggataagagcacaggaaaaacagttggtgtttttaacactcaactgttaaaaagtcatgcacctaaatgaaggattcaacttcttcaaagatgagtcataatttcctatttccaaacatagtcattgcaaattaagagcatttgatctaatttcaaagacctcagcaccaccctgggtaaatatgttaagtgagtcctagagaaaatgtggacactccgaaacatgagcttgcctctgattttaaaacaagcagcacagcaccagcacagcttagctgggatctgttcatctgtgcatagacaagcaggcataaatgaccttggtttttttcgagctgttcttcccaggggttcaaacctctaattaacttagcttctcattgtttatccaggaaaaaatccagaaacatctcctttatgtccattaaaccatccagtcttaggaagcatccaaaaccagattttagccctcctgagatgcccatgtccagaaagggatttattttaactatgaaacataacattccatttggtcctaattctctggcactataattttttggacacattgttactgaatatatttgttgcagatggttatgtaatagcaacattggagctcggcacataatcagtcatgaaaattgtgtccagctcatgaaataaaaatcagcaatgcttggaagtggggccagatacttctattaacttcctagacattggagggctgggaatttgctctaggtgttaatgaaaaggcagagaggccaaaaaaaaaaaaaaaaaagatttcctctcccttgggggtagtttggctcttcttcacctcttggaatatgcagagctaccaaaaaatatatacaattacaggaatacagagatagctgcctgtttacacagttaaagaaaggcttccctcagggtgcagcaacattgttctttaattttctctggccacagctgcctgctgttttactctgtatatagtcaagaatagattatttcatttctggaaaaagtaggatgatagactaagcaggggttccaccttgggaccctgggttcaagtcctggctctgcctctaactggcaagtcaccgaatctcatggagttttgaaatatctgataaactacatatggacagcttttattcaaataaatatgaccaggaaaaatctccctactaaatgcatctctccttagaaatcttatcacggttgtcattttataggtttttctgggttaatctttgatgaatgttggtccctatggcagacgttgttagtgcctcccctacagcctctcattttagggggttcaaccagtttctgtgtctctggttctgagaccttttattggaatcccggaaggcgattgtcttgcaggctataaatgctaaagaattaacagccagtggcagcagcagtagaccagttattctctggagttgatgtataaacaccccaatctcttaccctttgggaggaatgattctgaagtatgtatttttaaatatttttagcttcccatgggtttaagcttcagtagttcactgtggcatctggcttaatagcaccccctttattgactaccttctctttcctgtgtcactacaccacttctctaccagtgtcacctgaacctacaaagtaaactacttgcactggaatccttgcctcaggatctgcttctgaggcatcccagcctaatataggctttttcataagactttaagcctcaaaatcactgtgtatgacttattcaccatcatccaaagcctaccacagcatatggtaataggacctcagaaataattgaggaaaaatggaggaaatgtttattattgctgctgttgctgctgctgttattcagtgtgtaacacacaatcaacccttcactgagcagagtcaacaattcatctctgattcttggaaaaaatcaggtttagggattcctgtttttcattagtgaaaatgagaacagggttgggaatccaggtctttggggaaaggctgtcaggcaaaaggtcagaatcccagaggcagaggggatttgatctttagtgtgagagcctctgctgacagatacttaccgtctaaaggaggtaatccagaattaaagtcaaattgacaagccattcctgtaattgaggctaaaagcaagataagcgagaagctgtagatatagttagtggcatgaaggacaggcatgtcacctctggaaaaagtacgagttaagccggcacaccacctcctagtgccagtgactcagaggtttcagtgaaacatgcttgggattagtctgcaccgaaggccggcctcacccagctcctgacaaggggtcatttttagcttaaagaggtgccatcagctttaataggcttcaaatcttaccttaaagtcactgactcttcacagggcccagttttccagtatagttcccacctgctggcccatttcacctcattcaggaataagcttgaaaagcaaaagaatccaaagactgtgcttcaagatcaaaagaatcacattagcccaggaatcacagattgaaatgtctacagtcacctggccaggacctgctaagtccaaatgaataactgctcttcagttacaaggcagaagttcagatccagtgtggccagactttttcatgagaagctatatatccgggtttatgagtaaaaattcttctgttcttcaatattaacaagtaattactattttaaaagtaataaaaccaaataataataataaaattactatttaggcaaaattggtagtcagttggtactcaccagctcagctgtcaggattgttaaatattaaaatcattccacttaaattggtaaacaggccaggtgcagtggctcatgcctgtaatttcagcactttgggaggccaaggcaggaggatcacttgagcctgtaagtttgagaccagactgtgcaacataacaaggtcccgtctttacaaaaatataaataaaaaattagccaggcatggtgatgcatgcctgtagtcccagctagtcaggaggctgaggtgggaggattgcaggagcccaggagttcaagtctgcagtgagccgtgacggtgccaccccattctagtccgggcaacagagtgagatcccccctcatgataaataaataggtaaatagtcattatcctaaaccccctaaataacctccccaccatcctggctcctgtggtctgcccaagaacctgtcagactgctccatcattcagcaactaaagggcaaacaactaaccaaaggatcccctcaagaatcctgtttcataaatcaacaagcaagaggaaaatccattaaaaagtgggaaaagaacatgaacagacacttctcaagagaagacatacaagcagccaacaagcatattttaagaaagcacatcattactaatcatcacagaaatgcaaatcagaaccataattagataccatttcacaccagttaaaatggctattaaaagtcaaaaaataaatattgatgagattgtggagaaaagaaaattcttatacattattgatggcaatgtaaattagtacagtctctatggaaaagagtatggagatttttcaaagagttaaaatagaactaccataaatcattctaccaaaaagacacctgtactattatgtgtattgcaacaccattaacaatagcaaagacacggaatcaacccaggtgcccatcaatggtagactgactaaagaaaatgtgatatatatatgtatattatatatatattatatatattttatatatatatatcccagctatatatatatatatttatatatatatatatatatcccagctatatatatcccatatgtatatatgcatgctatggaatactacacagccataaaaaagaataaaatcatgtcctctgcagcaacatggatggagctgaaggccattatcctcagtaaattaatgcaggaacaaaaaccaaataccacatactctcccttatatgtggacactaaacattaggtgcacatagacataaagatgaaaacaatagacactgggggctacttcaggggggacaggagtgatacatgctttgaaaaactttttattgagtactatgcttactatctgggtgatgagatcagtcataccccaaacctcagcatcacacagtataaccatgtaacacacctgcacatgtaccccaccacatttaaaataaaagttgaaatttaaaaagaaagaaaaaagaaaaattaataaatataaaaatctctccacgttaatttaaaaaaaaaaaggaatcctgtttcagcaccatggccagcgtcgcttagtcagtgcctgcactactcttttttgttttttgttttttgtttttgacagtctcgctctgtcacccgggctggagtgcagtgacgagatctcggctcaccgcaacctccacctcagcctcctcagtagctgggactacaggcactcaccaccacacccagctaatttctgtatttttagtacacagggtttcaccatattggtcaggctggttttcaactcctgaccttgtgttccgcctgcctcggcctctcaaagttctgggattacaggcgtgaggcactgctcccagcctcttttttcttttcttttctttcttttcttttcccttttttttttttttttttttaagatggagtcttgctctgttgcccaggctgtagtgcagtggtgtgatctcggctcactgcaacctctgcatcctagattcaagcgattctcctgcctcagcctcccaagtagctgggattacaggtacccaccaccacgccagctaatttttgtatttttagtagagacagggtttcaccatgttggccaggctggtctcgaaatcctgacctgacctgatctgcctgccttggcctcccaaagtgctgggactacaggtgtgagcaaccgcacccagccttctttttctctttaaaaaaaactttatggagatgtggttgacatgtaaaaagctgtgcatatttaatgtatacatctcaataagttggttggatatgtatacacctgtgaaaccatcaccaccatcaaggccacaaacacatccatcacctcccaaagattcctcccaccccctttattattattagtgttaattgttgggggggaggtggtaagaacatttaacataacatacaccctcttagcaaattataaacataaaacacagtattgttagatacaggcattgtgctcttaggtaaatccccagaacttactcatcttgcatacctgaaactttgttccttttacccatcaccttctccttttcccctcctttagccctgcctgcactattctttggaattatctttaatatcatctctgggcacaagtcatgaattgaaacacatatgatcctacaggaatccagtttgagattcctaatttattccaattcccttcattttatagtcggagaaacaaagtccagcacagaggagggtacttaccaaagtcatgaagcaagtcactgacagagccctgacaggagcccaagaccctgagctcccaggccagggcgctgtcttttaaatcaatggctaccaaacctgtggagggatatggtttgttaaaaacagattccttctctaccccactgctgccaaaactatggggtgggacccagcccacgctgtttttaagagctccctagataattctgatgatcagaagatttgcagaacattgttgcaaactgtgccattgtcacgccagcgacacgttagccaccctcatccctatgcgggagaaattttgaaataagaggagaatctctgaacatattattcatataatttttaacagatttttacacagaagacatgcgtgtgtatatgtatgtgtgtggatgtgtgtatgtgtgtgtgttaggatggtaaaacggtttctcccaagcccctgaaatgtgtcttattgctatactaaataaataaaattaaaaaggaaagtttcaaagactgatagtgatggatctgcagagaaatggagatgtcatgttatcagaatgggacaggtcctggtttaaaccctagcgccactgcttagacgatgttgtccttcctcaggcatctcacttaaggttctgcactttacatctccatctataaactatggcaccaactcctaccaggcgaagtaattgtaggttttggaaataaagttgtcagttctggattacgctagcagtggattcatcaggaacaacaggagcctcatcacagagccgggtgaacatgtggcatctgctctgctcacagcgatggcagaagagccttagcagcctgtgtccaagcccagctacaaaagtgagggcatcccaggcccctgtgatccctttgccacctctgacgctcacactgatgaggcccaactcacccgccaacaactgattctgggtttcctttttctttctttttccttttagcagtgatttggagttacctatatatttctactgtcacaccctccatgtaactttagaaccaaccttagtcataaagcattttgcacagtactggcatataggggcagccacaatgaacatgactatggctggaaggtgtggtatgttgattgagaatcccactgtagaccagacagaccaaggtgcagctacacaactgtggatgttatttttaaacaatgtctttgagtcttaaattcactatcagtgaaatgaagacaataatggtagctcctacatcacattattgcaaaagctaaatgagcaaatctaggaaagggcttagcatagtgcctggcatgtaatacatattcaataaatgttgctattggtgatattaccattaatgtcatcattaatttcatcattcaacctcaaatttgagggaggcttgacaatagcttgtaagatttggtgataggactagcagcctaacgatggctaccaaacctaagatagaccccctcaagtctctgagtccaggagaagggtgtttgcactatggcttcaggccacagccagctgaggaaaatagttccagaagaaggcatctctaagtctgaaggcttgctccagaaggactgctggaaagccatcaaccactgtgagccttgttcctggggctcagctgagggatgccaaggaggagttctgggagatcttgagcttctggtggcccacgggtgtctgggaaatctcagatctcccagatctcagatctccaccagtttttatgtacaacgtgtaagttagacaggcaggccatcaacccaggattcgaagacaggcttcatgtttcttgatctaaatgttgactcttccctgaacactccaggatgcagcacagagcccagcaacaaagagacaaacttccagacataacagctgtattcggagtccagctctccagcagcctcagggtgtcattgtaaggatcagacaccattatgtaaagttactatagagtgtaaatcaggataattattattaacatcatcactacatgggctaaagttttcatcacaatactcagtgtgcaaaaatgtaactttctgtaactgaactcaattttttacagttcacatttttgtccgacgcaaaagtgtcatatagttacctccagataaactcattttcttctgggtaaatgcagaagtttcaggattaaaagtgtttcctcctcccccaccttcttcttctggatgggggatctcagatagcccaggtggcggtgggggacagggcaactcctcatctgagtcttggtatcagggaggcgtcaggtccacagtcattctgacatccgtgtctccttcagatccaggagccttctcctggccacttccaaactggcctcaggtgcagaaaacttttgcctgcttcctcctgtctctactttgggggactgtctcaggccctttggtacctagacacacagagcaccgtttgtttgccttgactagggtagaggtgctttggggctccctttaaaggcactataaaggcactcgtttatagccggtcccctgaaatacatgcgggtctctaagcgttcagccaccagctgtcttcaggtctcagcaaggcacagacccatgagcagaacagatgctgtatctgcccttatggggccagcaacagaagacaaataataaaccagtgtgcaaatcaatatacctgggattgcaaatcaagaaagctcaatcgaggtaaagtgggaggaagtggtaaaataaaccagggtggggggcctcttctatagttatcgggaccagggagggctgcagagaaggtgttcgccgcgctggggcctgcagagaggagaagcctctgcgtggagaggagggtgcaggaggaggcagggtggacactcaggtgggaaaacagcctgtgggggaaaggccttaggaggcctgggcctgagctgggcttggaagcaaggtcagcatggctggaacacagtcagtggaaaggcagagccaggcctgaggggcacggccacaagtggagtttatcctgagaaaaatgcaaagtcacagaaacttccattttagggattatttttaattattgaaggattttaaccaaggatgacatatatatttttgccggtaaaaatattctgttagcaacagatctcaacagaggcagtccggccactcccagaagacatgacaaaactgtagggacatttgtggctgtcacaatgctttgagcacactatcagcattggggatgtccagcgatgctaaacatccttcaatggatagtaaagtcctgcacagtgaagactgttcccccccagatgccacaaatgtgtttgtgatgagattcactggggatctagtagctgcttggaaacaaagagtagagggaggctgggcacagtgacatgagcctgtggtctcagccactcaagagcctgaggctggaggatcacttgagcccaggaggtcaaggctgcagtgagctctgatctcccttctgcactctagcttgggggacagagatcctatttaaaaaaaaaaaagagtagtaccacacaagtggtagcagggacagaattaggacagtactggagttttccaggtgggaaaagatgatgctgagatggggctggagcctcagagacagagaacagtgggaaagtaggcagacactgtgagctgagcacacggtgttttgtgttagtgagatgtggtcccagagtcagcagtgctcctggtggccaggagcaattgtctagaggtggcagctaaagagaacctatgtgaaaagcacgtggctcaggcagtcactcagaggtggcataaagagggtttagaaggaagcaatgggaagttcatctggaaaaggaccctgtgggcaagtttttgctgaagggcatggtatctattcaggaatgctccagtgagcttcctgaatataaagacactagctccttcctctatgaggggattccccctagaagcccaccagacttgccacctcccttccttccccacaccccaaactaagcctcacaactgtaatttgagtgttctccacaatgttttaaagcctctgaatacttgcctattactccgaaaattagctgccatacataattaggctaatttggtataatattcatccgaaatgtgaacatgttattaataatgaaagcaaacatatggagcaggtgtccttgctctgtcgagagatggtggctaagtcatgagctctgcccacgaatccttgctgtgcctcccccagtcaagaaggcagcatgactaggaaagaccttgcagagccccaggaccttgtgggagtcctcactggtggttatttactggggccccatactctgaatgtagcgttagcatttattccagtagattctcctcgcttcgggcaaattcaaaaaacaatcccattcagaaaacacttattgtgtctcctctctgcctctcaatcagccttagtctgtatcctcttgtggattgacaaagattgcagaagagaccctagaatgaggacaacccaaggttcatggggtggactgaaatatactaggtgagaaataggaggtgcaaatgattgggaataattagggtctctgcccagctgccctgtcatgttacaaatgtgcccacacctcatgacgcttcctgtgggcctgctgcccttttccacaggtggcatggcactgagctggacacccacatgtacaagtgtccatgtgagcttccagacatcaaggacagtgtttaaaacaagcatacctaaagccacggtattgaaactaggctacggtggggaaacaaaccatgctctctctctctctccctctctctctctctctactccctgattaactcactatagccaatttgaatttggaaattagaatttttttaaaagttttctaagtttttaggtcagtttattctgtctgtcacattaaatcaccagagagaatgtatttgccatagatcagactttcttttcatttaagagcattctcatcaagaaggcttccctaattatgttcaatcataacaacatggaatggggaatccgtgcattaaaaggcagtctcacaatgacacgtggctagtaggaactagagatgtgctgtcagacgtttctgaaccatgctgaaacattagatctgaaattgacccttgccttatccatgccaccataccagactggcttggggaaaattaggtaaatcacttttccattccaaatacatttggagacctgtgactttttagaatcatttatatggttatagcagacactgttgatgggaccaatcccctcagttcgcctgaggtcatgtgaagatgtaatagctggttcccagcttggtgacagcctcctgcctcaagtatttgcacctgtctgcttctctgctgaactttctccagcaccacaagtatttgctccactaagtggggacatatgccagaatttcaggggcagggtaccagggaaaaccctcaaccaacagaggtgggagtcagtgaataaatgcctccacctccccaccttctggtgagacaattctaggtgtgttccatggagtttcttaaagggcctccagccaggtggattcccagtgaccactcatatgcacaaccctcatcagctttctccgtccctgtctcatttccccactccctcacttgtgcttcctgaatttgtctacaagaagatagaatcacatgtcctcgaatctgagtctgcttctgcaggaacccaaaataagatagagacagagatagtttcatagacaaaataatcccccctcaactgataggttttagaacatgatgttgcagtaaactcaggccaagctgctcaccacctgtcatgctgaatacaagaggtgaggtatggggagagggaagtaacttttattccaaatgccagcagctggggagatgtcagggctcaagtcatgaagaaaccatcttcaattgcaggctgggtgaagggtgtaagaagggaaacttagtatgagaaacatgtggggtcctgctgggtaagggcctgcatgtctcgttctgagggctgtcttgggcgtctggaggtctggtcgtcattatcttgactgcagccctagtggtggtgaacacattgttcatgactccccctaagtgggaggatttcataacaggggcccatgcctggtttaagatgagcctctgggagtgttaagtaaccatgcagttagataagcatgcatgggacaagggagtgtctggtgggaaagagagaggaacatgaatttcaaagcacacttcaaggctatatttctaagcttaggaaaaagagttctgaatgcattttgaagatatttggttatagtattttattgtaagcttttggaaatgtatgtgtacttatttttatatgcagatacatgcataaacattttaaataaatgagatcaaattatgcaataaacagaaagatacaccaccaagacccccttacttagcaggaagctttctgtcccagatgctgagagtgctgtggaggtctcctccgagactgcctaccccagagtgcatgcagcccctgagtcggtccccatattgggttcttggcatttggaggagaagctgtaatggggaagaccacgtggaagctgcatcactggccaaactaatgagtctgaaacaataccatattctaagggtaggtggggaggtgggattagtgccacccttaaaggtcttaggaatgcaagggtaatggtccctattatatattcatttaactcactcatatggcccctgaagaactaaatgaattctgaaaaatggctttagactactgaagacataaccaagtagtagcccatttataactgaaataaactcataaataagtatgtgggacatttgtaaaataagcaaaaaaaaagtactaaagagcagaaaagaagacttgaataaatggagagccatactaatgttcctgaaactgaatatttaatcaaaaccccagagactgtaattcttcccatatgaatccatccttttaagggtcttaatcaaatatcaaaagatttattttcagaatatgaaggcagtattccaaaattaactttgaaaaacaaatgaacaataatagtaaaaactacattcaaaaatatattattaataagaagataaatggcaggatgattctattattattatatataatacactgtaaactaaaataatttatacagagataacagaattttttaaatttaaaaatagaatacagagtgacacatccaaaatctcaaagacctctaaaactcaattccttcttaaaagcaatgagaacactgggaaaaaataccaaaataactcttccagaactctaaaaattaactgaagacctgcaaaaatgtgagccatgtttattcaagaacagcaggtgagtcttggtaggtcggtgagctttgtggttctgacttgtcccatatcacccctccctggcccgcagcagccttcaaaaccagaaaccccacaaccatgtttgttcccaaaaccagcagtcttgtagcaactggagagtcccagtttagggagctgcaaaaagccccaaccccagagaactgaccctatttcatctgttgggcagcaccttggaaaagccccatgcacaggtcttgttatcatctcacctgatccagaaactcctcagggaaagtcttcagccagggtgggtgtggaaaatggtaagtgacagttgtttaacctcacagctgcctgagaaagtgatagcagttgcagcatgtaaaagactgtgcagaaaacgtaacaggaagtcttgaaaaagagatgtttacaggggacttcaaacactctgagatattcctgtgaccccacaggtcgtgggcatgagcaaggctctggcccacccaggaaaagacctgagaagccccaatctctcacttctggcggacctcaagttcctgcaccaacaggcagcaaaggctgaagctgagctctaaactgccagagtgctggaggcatcaaaccctgacacagagagagccctcagaaaggtgtagaagattcactggagacatcacacccaacacagaggagagagaaccctcggcgaggtgtagaagactcactggagacatcatacccaacacagaggagagagagcccttggtgaggtgtagaaggctcactggaggcatcacaccccaacacagagacagagagctctcggtgaggtgtagaaggctcaccggaagcatcagaccccaacacagagagagagagagccctcagcaaggtgaagaaggctcactggagatatcacaccccaacacagagacagagagagccctcggtgaggtgtataaggctcattggaggcatcacaccccatcacagaggagagcgagcccttggcaaagtgtagaacactcactggagacatcacaccctgacacagaaagacagagagagagccctcggcaaggtgtagaaggctcactagaggcacgacaccccaacatagagggagagcacctttggcaaggtgcagaaggctcactggaggcatcccaccccaacacagagagtgagagccctcagcgaggtatacaaggcccactggagtcatcacatcccaaaacagacaaagctcttggcaaggtgtggaaggctcactggagtcatcacacccaaacacagagagaaagctctcagtgaggtgtagaaggctcactggacacagagagagagagagagagagccctcagcgaggtatacaaggcccactggagtcatcacatcccaaaacagacaaagctcttggcaaggtgtggaaggctcactggagtcatcacacccaaacacagagagaaagctctcagtgaggtgtagaaggctcactggacacagagagagagagagagagagccctcggcaaggtgtggaaggctcactggttcaagacatccaagggatttgttcaatcatttgctgaccactgagccaaccaagcatagatgtcaatggtttcactgtattttacaagaaacaaggacctcacaaagttagtccagaaaagtcactaaacagcaaatagcaacaacagatcctagggagagggagtgactcgtttccaaagctttcaagttatattattttaaatgtccaatttttaacaaaaacttctgaaagatgctaagaaacaagaaagtatgatacacacacacacacgcacacatgcatacacacatgcacacacacgtgcacacacatgcacacacatgcacacacacatacacacacatgcacacagtcatcagaaactgtttgagggaccccagatgttgtctttactagaaagactgtaatcggcttttacaagtatgtaaagtatgaaaacaatgaacaccaaatggagaatattaataaagagatatacaatacttaaaacactaatggaaactctgaaggtgaaagaaacaatattttttaaaaaaatcaatggagatcaaacagcagattttagtttaaaaaaaagaatcagaaaacttgaagatgcattaattgagattgttcagtcaagaaagagaaaaaagaactatgaaacatgaacagagcttcagagacctgtagggcaccatcgtgcaagccaaataaacatgagtcacaggaggagaggagacaagagaaagaagctaaaatagctttgcaaaaagaatggtcaaaaacctcccatatttggtggaaatcattaagcactgtgaaattcaaaaaactcctaatagaataaattcaaaatgggccaaacccagacacattatagtcaaactggcaaaatatggagtgcagaaataggcaatcagagctggtcatttagtatatagtataagcggcatttcaattcactgaggaaaactgcattgttgttaatacagttgggccatcaggttagtaatttagaaaacctaatatgtatctccctaggttcatctgcatcatcacaaatgacataatttccttctttttaaggctgtatagtattccattgtgtgtatatgccacattttgtttatacattcatccactgttggacacttaggttgattccatacattgactattttgaataacgttgaaatgaaaaaggcagtgcagatatctctcaggcatatccatttcaattcatttggatatgtactcaggagtgggagatacagtgtggatatttgtcttctccaaatctcatgttgaaatgtgatccccaatgttggaggtgggggctggtgggagatgtttggggcgaatccctcatgaacagcttggggccctccccacagtaatgcatgagttctggctctattagttcacatgacctggttgtgtaaaagagtgtggcgcctcccacgctgctccatctcccaccatgtgacacccagctcccctttccctctgccatgactgaaagcttcctgaggttctgagcagaagcagatgctggtgccctgcttgcacagcctgcctagccatgagcctcaggtatttctttataccaatgtgaaacagacgaacacagtatattgctggctcaattatattgttaattttttgaggaaacttcatactattgtccaaaatggccgtaataattgacattcccaccaatggtatgtcagtgtttctttatctccacttcctggccagcacttacctttcatcatctgaatcatagccattctaacaggtgttgaggttacagcacaagttgtaaatctctcactgaggttttcattttcattatgtgatggttagaggggttgagcattttttcatacatttgttggctatttgtgtgctttctcttgagaaatgcctgttcatttcattcgtccattctttcagcaacttatgtgttttcttgctattatttgaatttcttacatatttttgacaatagccccttatcagatgtataattgaaaaatattttcttccaactcatggattgtctctttactctgtagattgtttctttgttatacagaaggaggacataagtgaagtaagccaagcacagaaagacaaatactgtattactgcactcatatattgaatcaaagaaagtcaatctcatagaaacagcaggtagaaacgtggttaccaaggctgggagaagggagaaggaaggggaaaggggagatgtcgatcaaaggggaaaggggagatgtcgatcaaagggtacaaagtttcagttacactgcaggcataagtgtttgtcatctactgcactgcacaatgaccacagttaagactaatgtatatatacagatatatattttttgagacagggtctcactttgtcacccaggctggagtgcagtggcataaacatggctcactgtagcctcaacctcccaggctcaagtgatccttccacttgagccctcacaagtagctggggctacaggcacatgctctaccaacttaatttttttattttttgtacagagtgggtttcaccatgttgcccatgctggtcttgaactcctgagctcaaaggatctgcctgcctcgtcctcccaagttgctgggattacaagcgtgagccactgtgcctggccaatcatgtatattttaaaatcgcaaaaagaatagatttgtgacattctctctacaggaaatatgataagttgttgaggtgatggatatgttgattagcttgttttaatctttacacgatgtatccaaacatcacattgtaccacataaaaaatacaattattgtctgtcaatttaaaaataaataaataagccagttaaataaataaggatataaccaaataatggaattcataaaagttatatgattaatttacagccaccataaagatatgacacatatgtattaaatatattctctgtgccaggtcctattctaacatggcgctaaagatatagcagtaaaaaaaacaaaattcctgccttcttggagcctgtattttaacggagggtgacagacaataaacacataaataattggaatgcataaaatgtcagatggtggcagctgtgatggggaatgataccgcaggaaagaggactgaggagtctgaggagctgaaagaagggagggttgaaatttcatataaggtggttggagaaggctccaatgagaggatgatgtgtgagcaaagacccagtggaggtgatgagctaacaagttatgtcaataactgcagggaaagaatccaaggcagtgctaaggtcttaggtagggtggcagtatgcttggtgtgtttgaggaatgtcaaggaggccaggtggctagagggagtaaggggaacagaagagtgggggccagataggcaggagcttacaggccatgacagggatattggctttcactttattattactatttttttaagacagagtctcaccctgtatcccaagccaaagtgcagtggtgcaatctcagctcactgcaatctccacctcctggactccagcaattctcaggcctcagcctccccagtagctgggactacaggtgtgcgccaccacactcggctaatttttttgtattgtagtagagacagggtttcaccatgttgcccagggtggtctccaactcctgagctcaggcaatccgccccactcagcctcccaaggtgctggaattacaagcatgagccattgcgccaggtggctttcactttaattgagataaagccatgagagagttttgagccaagaagtggcatgatgtgataataaaatgtaaacttcaaaagttgatacatttcaaaaaaaaatctgctggaattatttattttttccaaaataaactttctaaatgatgaaagatttaaatacaaaaaagaaaccataaaagcactagaaaaaaacataagggagtgtatttattgtctgagaaaaaaagacattagttttcacatcaaaactaaaaatgaggaagaaaaatgctgacaaatttgattatgttataaattttaaatttctgaatagcaaaaatcaaaattaaaaaaagagagagctgtaaaatatttacagacgcatagaagccttactacacaaacgtgtttgcaaatcaaaaacaaaaggcattaacagaagagagaataaaatagccaaaaccaaaaattatggtgaatggcacgcacattggaagatataaaattaaaacacaatccaatgctatgtttcatatatcagattatgttttaccttctttaaatctgtcattgtaaacaaagatatggtaactaaagtcaacctgaaaggaagaagctggggtgcaaaataatatttatttatatgagatggaatttcactcttgtcgcctaggctggagtgcaatggcgtgatcttggttcactgcaacctccacctcctgggttcaagcgattctcctgcctcagcctcccgagtagctgggattacaggcacctgccaccacaccaggctgatttttgtatttttagtagagatggggtttcaccaggttggacaggctggtctcaagtcccttacctcaggtgattcacacaccttggcctcccaaaatgctgggattatgggcgtgggtcacagcaccccgccccaaaatagtatttaaagaatttactggagccaacgtgaggacacctgcccgggacacacttcccaggtgccttggggagtgtttggtctgcctctttcacaaggtttttgaagtcaaggggaacagggggtgggctggtacaaagttgtttgacaggagttctcactggtttagagagataacattaattagagattgactctacattgttgacctatagggtatgagttaaggtgtcctcctagggcattttatggctatggggtgtcagttagtttagagcccatagaggaagtggcttcaagagataattacttagctccaggggtgatggctgttgcattttaaattcctctctgggtctaaacatttaaaggggctcacatttctcacataaaatggttttttgttttgttttgtttttttgtttctttctcactaaaggcatccctgaacagcaatttggctggatctgttaatattttaaagtttatcctttggcctagcattcccatctatagctatttcaccccgtagaaacaccaagtgcaaaaatatgccaggctggccagccacagtggctcacgcctgtaatcccagcactttgggaggccgaggcaggcagatcacctggggtcaggagtttgagaccagcctggctaataaggtgaaacactatctctactaaaaatacaaaaattagctgggcttgatggtgggtgcctgtaatctcagcactttgggaagccgaggtgggcagatcacttgaggtcagtagttggagaccagcctggccaatatggtgaaacctcatctctacgaaaacgacaaaaattagcccggcctggtggcacccacttgtaatcccagctattcgggaggctgaggcaggagaatcacttgaacctggggggcggaggttgcagtgagccgagattgcgccactgcactccagcctgggctacagagtgagattatgtctcaaaaaaaaaaaaaaaaaaaaaaagaaaaaaaaaaagcccaggcatggtggtgagcacccatagccccagctcctcagaggaggctgaggttggaggattgcttgagcccaggagtgtgaatcaagctgggcaacatagcaagaccccatctctaaaataaacaaattaattacttaactaattaattaaatatatatccaattggatgtttattgcagtgaagtaatagtaaaacaattagaaaaatctaaatacccatcaacagattttgatcaacttatctgtgaatgatgataatatttaatattagggtacctatatttaaaatcatataaaccttaaatatgttacctcagtgactgtgtcatagaatacaaatataaaagctttttttactaccttttaaactttatgttgaggcctcatctctagaatccagaatatacaaaatgttgctaagagattaaaggcaactgccaaccttaaagaatgaagttcagaagatatgattaagggtggagtttatttgggcacacagcttgaggatgcccgtctgggagacgccgaccccaaatgaatagggagagctggtgtttgtttcacttctaaagccagagacagaaacatcggtgagatcaggacactttccacaggataacagggcagagctggagcaaactgatcagtcacatattgttccattccaaggaagatgactccactccaggaagagggttagtgacctaagggggtcttgacactgttgggttataattatttacgagcagaaaaaagcggaagccgcagctgcattccacgtgactctgctgcatagccatgttcctcacaaggctcagaataaggtaaaattccaataactttaagtttaaattattttaagtttgaattatgtgatatcacaaaaccaaaatacttcaccccaaaatatgtgtcttaggcatattctgagctggctgttcagagggcctgcaaacacaaggagccctgcaaagctgtcttttgtggggcagatttgcacctgcagaggaaataaagggaagtaaacaacagatgtgaaaggctttctccgaagtcctccttgtcaaggtccaggaaagattaactgagaggctgacacctttaaaggtcttgcagagaaacatttaccagaagctgccacccaccccctttgagggctgccacctgagaggctccagctgtgtaccaagactgcctctgctaaccaggcctcttctcctcttctctctctcccgtatcctttttgccatgatccaagcccctattttctgtatattcaagagggctaaaagcatcaaccatcttgacatttgtttgagtctttatattttgtatgactcccaagcccatatgaatgctaataaaatgtttacacctttttcccctggtaatctgtgcattacatttatcttacagactcaaattaccaaaacttcaggaacaaagttaaatgttccttcaaaatataagactaggaaatcagagttgggagagaaattagagttcatctatcctctcacctcctttttcatatggaaatttatgactcagagagggggagtaactttcttaaaatcatgcagcaaaagacaaggtacaagatctcaagttttctgacttccagttaagcattttgctcccagaattttctcagactccagaaaatgataagcccttgcagggctggtcctttgtctcatctcccttttctcctctatgatccacacagtgcaatgcacagagcagagcctcaacgagcaggtgacagaaggaaatttaatcagtggttaaagttaagcacttggctgagcctcaccagtgggtgtgcttggtctgtcagcacacaggacttccccttatggctcctctgccctgatgccatgaaaaacagatcaggtcccataaatcgtgaggagtacatcccctcagcaaggtgactggagtcacacggttcactccttcagagcaaagatcttcccgtctcataaagcaaattccataaggggccttaagaagactttgtatgtaatttgctgaaccttaagcccaacatttgaactattttccatggagacctgtctgttacgcgcctggtgcggagcactgcctggatttcagaaatccaccccggtcctgtgctttctcaccagagcaagacccagcctggaggctccatgactcctgatgccatttttctctctcattctctaagaaacagatcctgaaacaaaaattcatgaataaaaaatgtatctgggcccaggcgcaatggctcacacctgtaatcccagcacttcgggaggccaaggcaggtggattgcttgaggtcaggagttcaagacgagccttaccaaaatggtgaaatcctgcctctactaaaaatacaaaaattagctgggtgtggtggcaggcgcctgtaatctcagaacccaggaggcagaggttgcagtgagctgagatcgcaccactgtaccccagcctgagcaacagagcaagactctgtctcagaaaaaaaaaaaaaagtatctggaaggtgatcccaggaaacacaggtaagggaatagaagagtgagatggggccaggtgcagtggctcatgcctgtaatcccaaagctttgggaggctgaggtgggaggattgcttgagccaagaattcgagaccatcctggacaacatagaaagaccccatctctacaaaaaaaaaattctaaaaaaattagccaggtggtggtgcacacctgtagtcccagctacatgggagatcgaggtggaaggactgcttgagcacaagagtttgtgccaagagctatgattgtgccactgaactccagcctgggaaacagagtgagaccctgtctcttaaaaaaaaaaaaaaagtgaatagaaaggctgggtgtgatggctcacgcctgtactcccagcactttgagaggctgaagtggcagatcacttaagcccaggagttggagacaagcctgggcaacatagtgagattccatctggacagaaaattaaaaaaaaaatagccctgtgtggtggcatgcagctgtagtcccagctgcttgagaggctgaagtgggtggatcacttgagcctggaaaggtcaaggccacagtgagctacagtcatgccactgcactccagcctgggtgacagctagaccctctctcaaaaaatagtcatcataatgaataagaggattgcaggaggtaacagtaaaggatggattatcaagctaattaccaatgtgggcaactggaacttgatccttctgaggcaggaggtgcaacctgactccagaagcgggactaggacgccagaacaaactgaggactgtctgaaacaggaactgcgcagatgtagctttccataagacacgcccactagtgagccgcgtcagtttactgttgccatggcaacactgggacgttacagtccctttccatggcaatgatctgatgaccctgaagttaccaccctcatcctagagatgtctgcatagagatgtcctttaatttgcatataattacaggtgggataaacgtggctgcagaactgtcctgagctgctcctccaggcacacagcctgtggggtggctccgctctgcgaggagcagtccccctgctgctgcacacagccgcttcaagaaaagttgctgtccaacaccaccggctcgccctcaaattctttgctgggagaagccaagaattctcccaggataagctccaatttggggctcacctgccctgcatcacttctgggcatagaacacactctttggagttagctcccatgaggacagaggggctgggacatttgtactgactcaaggcagcctcccatcatgggctgtccatggaggcagggaagattatcttgtttatcagatcttccaacgtgcaacaaaaagatcccggggtagttggaagtctacactacactacactacagtgataagacccagggagggatgagtgaggcacagacattatcttttaaatatattttgtctgtaaagtgatacttaaattttagttaagaggagagactgaatgagaaactattgaaatcttaggacagggctttaaagacttagctcaagtccccacccaagattgtatttgttgcccaaaactgcccacctacccatccattgacttccttgcatctctcaatgcaaagagagacttaaaaactgtttcaggttaatcggaagtaaaatattttggcttagcaaaatcactgtggatggaaattggagcaaccccatgagagcgcgtgcctgagctcagagctgccatgtgcactttattggcgctgggaggaggtaactgaagcggagaggttcctcactgatggtggggaaatcggctttaacagctaaggcaggaattagtcacccggggactatctgggcatgctccgtgaaagaggccatctgtggctgtttatgaggatgtgtttgtgaaaagcgcctggcaggctctgcaagagggttctggcgccacttctgagtttccttttcctccctagcccaccatgccttgtgacaagagcgctctccctggccattgctcagccaaggggtgggcatgaactatcccatgtttcaaggtggcacctccacctctagggctctctcagtcttggcctggaagagctgtcaaaggaaaatggggccctgaaggaaaaggaggagaacctgacaattccgagttaagagcaaggagaaaacaataaatttacaaaccatattagtggttcgtaactcactttgtgacgcctgctttggtccacgtgaagatgagggagaggcatgctcatggggtggctcttagtgctctgaatgggtagaggaaaattgtggccacagggccgcagggcacaggccttggctgatctgattttccaccatcccccattacattgttctgcattgagacactcccttttggagagtggtcatacactcgatttgaaagaaaatcttgatggagaggaggcagtcatgtggttcatgaactgctcaggcagcagcaaatctgggcttccaattccagtacatatttgcctgatgtctgtgtctcagacacctcataaaacattatctgggggtcagggagcggacgaagccagggtgggcagactctggcatccagtgtgactgctggaccctcctatccccagccagacacattttcacagcagcagaaggtcatcaggagataatgaaggaaacaacagaacaaacaaggaaacgtgagaccttgctcctcagagacatggagaagccaccagtctcagagccagggcatgcataattcctacagttcataccagaacagagttagaggcttccgtccaagtcctttccaaaggcaaattaccatgcctctccttgaggcctgtgttcttgtcaagcccaggagccctgcaggatgtgatcccccaaagcaggccacctgccaccatgcacgcccacctccagagtccctgcttttcctagaaaggcatccaggacttctgtacatgaacctcagcctgcctggctcacagcatccctcctctcccctcctatcaacaaggctgttatcaaaataatttttttgtttttgaggctgagtctctctctgttgctcagactggagtacagtggagctatctcggctcactgcaacctccgcctcccgggttcaatctattctcctgcctcaacctcccgagtagctgggactacaggtgcccaccaccatgcctggctaatttttatatttttagtggagatggggttttgccatggtggccaggctggtctcgaatttctggcctcaagtgatctgcccacctcggcctcccaaaatgctgggattacaggcgtgagccaccgtgtctggcccaaaataaatttttaaaaaattttcatcaattatttatttatccttaatttttcaacctttaaaaaattttcaactattttagaatcagggggtacacgtgcaggttgttacatggggatattgtgtgatgccgaggtttgggcttctattgaacctaccacccaaacagtgagcatggtacccaacaggtggtttttcaacctttgccccttgtagtcttctccttcttgtagtccccagtttctatttttgttatctttgtgtccatgtgtagtcagtgtttagctcccacttttaagtgagagcatgtggtatttggttttcgttcctgtgttaatttgctgaggagaatggcttccagctgcatccatgttgctgcaaaagacacaattctattcttttttatggctgtgtagtattccatgttggatatgtaccacatgtaaaacaaattatttttggtctcttgaaatttccctgtattttcctgctctctcctctaattagggtggttgccttcccagatctccacttgtggaaggggagctactccagattcaactcaatggccttctccccagaaagccatgcatacttctcccatgctctcactctgcttggttcatccttgttgcagctttatcagcctttgcctgggctgcacctgctgatgcacatgcaggcctcttccattgggatccacacttccagatgcagggctcattccattcacccatgcctcctcctgaccaggatttggatgttctgtatatttgtatgcacacacacacacacacatacacatataaagtatgtgtaggcactcaataaattcttgttgaatgaacagataaatgaatagacattttcctgagttttctaagacataatattctttaccccccctgaaattggaaacatgacccttaaggctgatggtatttgttgagcaactgctatgtgccggatgctgcggtggtaacttgtacacttgctctctcatgcaaaagctacaactctctcattctaaggctgaatcacactgtggttggcgtgaggtacaatcccaatgccatctatctgctccaggctgtggataggaatagaggtccaattagacttcagttcaagccacctgctgagagaggagcataggcctcccaatatcccctcccattgtttctgagtcctgcaaagacagtctcgtgagccacagacctggtccagctccatcaccaagcagtgtgggcctgattctgcctgccatggccagtcacccccatcaatgcctgtgcaaggtgcaccgcctccgaacatcccaaagctcccagatgtgctggaggtggcacaggatggaagaatcctgtccccggcccatgccactctctcatggcctgcaaataccagcagagtggctttggggcccaactcataaaagctttggctggcttctggtccccacccctataccatgggattcacaccagggccaagggctgggcagggcatgtgagatgctgctccttgtttatccttgtcagcctgttccaaagcaccaacatctcctcccagcctcccagttatgaaacaaaatcccccctgcattcaatgcgtgcagcagatgccataggtgggaggaggggcagcaagggcaaccttggcagcctgagccccagcccacccaccaacatgctctgccaagattcatttacacttgccaagctctgggctatgtactctgccttcattatttcatattaactcttagttaatacagtttaaatatctgtgaagatacctattattgccttcaatttctagattaggaaacccactgcaaggggttaaaaaagttgcctaagtcctcaaaaatagcgtcaggattagagtctgagttcaggcccatctctatccaaagcagtgcttttaataaggtagatttctcatgttagtctttttcttctaattaatctgtaagtttctccccctgctgtttggatatttacacctctcttgttcatggggcttatccctgggctgagtagaaacttgttgaattaggttaaaatcctgaagtcatcctaagctgctaaggaaagttacttttcccagaaacctataacctctcttgggagctccttatctctttcctcaaagcagggaatatgcatgaacaagacatttaattactcctcgtgatcagctcctacattctgtaataattatctttggcgatgttatcttgagtcccctgggtggtatggacattatgaaccattagaggctgttctgaaagctggccatcagtctgattcatattaggccaattacttttactaaaattaaaatttgtcaaggatagcttgatcatgagtcctggcagctaaaaggagccctttaaccagccatgaagcactctttggcagaagcacagtgatttcatctcaagctgaaggtctggttcttagtgaaactaccagagatcaaagggaccaacttccctggatttgtcaccttggacaaaagccctggctcccggtaaccactcccgctggaatcacgcagtcagtcattgcttagttctcttctatggcactcagaggtcctcaatagagacaaagaccagctcatggactcagcaatcatgggttttatggtgtagttggtataacaaatctatgtgttacccacacaacacacattcccatgtttcacttgccaatagaatcccagttttgctaggagcagcaacaggacgtgctaaaaaataattattttcccagccaccttttcaagaaagctggtcatatgacctagacattaaagagacctaaaaggaagtctgcttctagctttctgggaaatttttcttttctgacaacaacaacaacaacaacgacaaaatgcatgtgcttcccgttttcttttgtcttctcccttctgctgcatggagtaagcatgcacttgctgaaagtgcagctgagacaggccggctggctgatttcctattttgacatgggctaatgttaaaggataaaagcccttcactcaaactctggctcatctaaccctcaggcaatcagtacaaaagacctgggaacctattgacagcaaatttctatcagggggctaagggctttcctcaagtactgcgtgtgcagtcagacttaagctccagcctaaagttactctttcctcatcatgatgctaaaattcatgcccagagtggagatttagaatgctaatactacatgcaatgcataaagaaacgtgctgagccactgtgcaagcactggacaaactcctagacacaccctgacataacccttccctataaaagaccctataaggctgaactacacagtctccttgggggccaccgctcttttttcctgtctcacgctggctccccattgcacaaggtaataaactctcctttattgccacgtctttcttgacttctatcctgggaaatggaaaaaacccagggcaccagtctcatctgccaccctgcaaacatgagatgatcaacttaaaaatgaaatctgacctggttaagaatggaagaacggaactgtaaaaagacgctgggtccttggagacacgggagctgttgcacagcgttgtgtggccctcctttgagctaggttgaggaagttaggtttcatgtcacttactgctgaaagtaacaggtacagttgcaaagacaaccaaagaaagatacataatgaccccagctgagcaggagcatgaaacagtgtgatgggtggttctatctaaagaccactcaggtctggtgtggtgggtggttctatctaaagaccactcagggctgtggccgaggatggaaggcaaatgagatcagcatgggctgagaattctctctgcccgcacccttcacagcatgtcttcattctcacgtgtggagcacctgctgtgcttatgtgtcaggcactggctgtgtgatgctataaatataatacgactattacatggttgcttgaaaacatgaatatttgtaggttcggtatttcctaagtacccatgtcccactgccggccatccaggccatgtgagcctccccccaccgagcccctgaagagggctccttgctgcactggccggcacacatcaccacgctgagcatggggcagaaaggtcccgaggagaagggctcacgagatgccacccaagggcattgtatgctgttgctgtaaaggcccagttctcaccttgtgtcacttggcctcatcgtcacattctctggctgacctttctgtaataaatatgtttccgaaattttatgttaagctgatttacattttacatatgctatgatggtttccaattttactattataatcaatcctgagtctaaacttttctgtaaagtgattactttctccatttatctgattgttggaactagataatcgattatcaaatttttatgcaaaatgaaaaaatcagagataatgtcaataaaatatcacggaaaatgcacctgtgatgaagttaccagcatgtccctaaaacctgctctacccacagctgttacttcctagctgatgggaagtcctccttccaggtatgtaggccaaaaggaaaaaagtgctgttctaaacacgcatctttcccttacagccacattcaatcctttaacaaacactgttgctcctgcttccagaatgcacacagaatctgagctcctctcgccacttccctgccacgaccctgctccaagccaccatcatctcttaactgaattattgcatcagcttcctcacggatatcctgttcccacatttacctccccgcagtctatcatccaccacaaggatcccccaggtcactgttgtgctcacaacctccaaaggcccctgcctctctggagcaaaagccaaaaccccacccaaccagtggccaacatgacccacgtgtctctctgcgggctctcccggggctctccctgggctgcctcctgcctggctggctccaccacactggcctccagctgctccttggggcctgtgctctggccactgcctcttcctggaatgctctcccctccggatgtcttcatggttcactgcctctcttcctcacctctgtgttcatgtgtcatattccgggctatgggttggacaggaccagggtgtacatggggaggctggatgggagggccctagtcgcctctgctccccattttcttaaaccagagcagcttcacttttgtgggcctcatatactggagtttcacatacgattttatttgagcaaaggatactaactactgtctcaacagaaagcttgaaaaaccaccagatcgaaaggggcatggcaggtggttgggagtcttgttagatattgttgatgtatttgtgggaaatgataatgtgtggcccaggatagtgggggaaatgaaacagatggccttgggaaacactgttgagggtgaatttaccaagcatgtttattgattggctgtggaaaccaacaagtatctgaggcgggtctcaatcaaatcaaaagttttttttgtcaaggttaagaacatgcctggaagaaaggactacgggatcccagaaacagcctgtagtctgtgcccttctccagagttgactttgagggcttcaatattttaaaagggaaagtgggttggagggaaaagagggagggcatggtcacattactgaatccacatgttgcaagggaaaaggaacaggtggggaaatagtcaatcatgcatccttcctgcactcagtaaatcggcactttacacagacaaggtgaacgcagagtagagatattaatagttagccttttatctgtagctctctgcttaggaagaaaagaaaaggcagcttcttgcatgactcagctttcagctaatttttccttttggcagggtgcattggggtcccgagattttattttcttttcatggttgtgggacaggagaaagaattagggatgctctttgcctctgacatgaatactggatatgtggtgattgttcatgccagatacgcaggtatcttagatgagaaattcatttttattgagtttcgggtgtttgagacagtcccaagaaaactattttcatttcctggctgtcaggaaataaaaatgtttttatttccagtcagtttcagggataaggtgagagacaaggtcagataggaccagggattaagtagtcatcataaataatagtggctgccatttgtcgagggccgggtgtatgataggcgtcgtattaaacacttcctctcataaggaattaaaatgacattataaacataaagagtgtttgttcatgtcgtatttctgttcttctcattcacttaagttagtgaaaagtgggatatgcatgatgaaagagatgcttcatagaaatggtgggcaaaggagctgcggggcctctgggaggaactagaagcagcccccgcacacccttagccccgctttgccatctcttgcccgtcctcctcttgaaagatcctcttcgccctgctctccagctgcaccgcagcctgccctgggcctcacctccttcagtggaatcagcgcgcccaggaagaccgagcccctgttgcccagcagcggtcacctggtgacgaacacacccttttttgtctttctttcctccatgtctcactgtcccactgcctcatcgtacttctctggaggctacctccacccaaattattgtttcagggtctgctttgcgagagaacttaaaataaggcagagaatgtgagggaagtttcttggactgtgcagacagaccagagaaaaacaaagaggccagaaaacagagagcggaggccaagaccttctgcttcccgagggacgcggcgccctccggcgtagcctgaggggcattagcatcttcgcagtcactaaccacggtcatccatctcctgcctccgcgcagctcccacagacagcctgaacggaacctgttaattacgctcccaatcagtccatagatcaaacgtacaaacgagcagcccgttccttccttattattattgccactgccacactcctgcccataatccctggcccacagccaggtctttgtgttgttttgaaaccagcaaaagcaacagcatgaatcttctgttaaaacacacacacacacacacacacacacacacacacacacacacacacacacacaggcactccactaggctatttttatttcctggctgacagtccttttatcatctccagtgggtaagaaattaattgggggcttgaaaatacaatttttctataggtgattactgtaaaccactgggctgccttgcagagaggggactgtttccatctcaggctaggaaaacttggtgcattttttgcattatttctaagacatcatttcccaattacctttgaaatgcttcactggcaaccctccaaaacaagccctctccttgctaacagggtacatgggggagttctccacatcatttagagagccttatatgcacaatctcccctgacacaagcactccctgaaggattagcgagcagccacttggactaataacaattccccaatatcacaggtgaataattaccagctcttcttctctaaaaatggggaaataaaagaagatgggtaggacagaggtacccagaagaagaaagagaggaaacaggactagtttcatttttttaaaagagcattaggttagaatttcaccttcagtttaacctaaaactatctgtatctgtatctctatctctatctctgttctctctatctctctctctgtctctctcaatagatgatagatacagctatattttaatatctccctatttctctcttttttcctatctctctatctttctcagataatgtttccagtttatcttcaatgtgacatttccataaattgacggggctcacagggtttacaacaaaggcatgtaataagccctgcaaatactggggagtcaagattcacacaccttgagtaattggggcaccacagagcagaatatgtaatcaagtacaaaatgttgtgagcacaacaacaattacacaacaagtacaatcaagttgtgagcaggaagtatttctggaaagggagagataaaggagggagaggggataacaatctctggacactagtcttggaagctcccaccctacgcaggctgtgacaggctcctcatgaccccaccagttaaggccttgttgggtaacactcattcctaaaaagctccaccttatcttgaactgaaaactggctcctaaaagccttgtttcttcttccctctgaagcctcggaacactgagtttctttcttattcctcaagatatatgaaggtagttcttccaaactctcaagtctttaatgacctctaattttctgactctaaaaaatcttttttaaagaaaaggatcagattaatgtcactctacatttaattttttaaaaggcattttcaaatgaaagaagccagacatagtttaggatttacgcttgacaaaaccaagcccaactcaagagaactgaaagcagagactcaaacctgtgtttgcacaccggcatttacagcagcattattcattgcaggcaaaaggtggaaacagcccaaattgatggaagaatggataatcagaatgtggtacacgaatacgacagaatattattcacctaaaacaggaatgaaattttgacacatgctacaaaatggatgagcctggaaaacattatactaagtgaaatgtcagacacggaaaaatactgtatcattgcattcacatgacctacctaaatagtctaataaaaaacacagaaaggagtggggtggttgccaggggctggggcaaaggaaataaggagctattgtttaatggcatggacttccagttgggatgatgaaaaggttctatagatgggtaatactggtggttgtacgacaatgtgagtatacttaatgccatagaagtgtacacttaaacaggaaaaatggttcaaatgatacatttctgttgcaaatatttcaccaccaccacagaaaacaagtccaatgtctactcactgacttccccagcccctcccagtaaagttttctgaattacttgcagtcaattcagactataccagatgaagtgtttctgatcatccccttggctctttgtagaagcaaatacccagaatggccatgtcacagctcccatatgttctcccacgtcccctgccacatatggtgacacatggccacggactgcaggcccgaaggttattttcatcatggcagtgttcctctttggcccacatccctaacctgggatcaagttactgtggtctgggtcaaagctggcagcccacaaggttttatagagagatgctggagtattgagatgccagagcaggactgaagttaaaacattacacaggaggccagaggaaaaaaaagggatttgtccaaaatcacagaagagaaatgagattattttcagtcacactcaggagcttgctgatcctgacaataaccctgacgctgtgcttggcaatgccctctcatcgggggcatcgggggctaagcacagaaggcacatgttcctgagtgttgtctgcatcgatgtggttacatgattccagatggaaacaaataatctattctttaataatctgccctcttttaagactggccctacttgatctcctgtccccacttagaagctcacaccccagctgctcaggagaatggcgtgaacccggaaggcggagcttgcagtgaacagagatcgcgccactgcacgccagcctgggtgacagagcaagactccgtctcaaaaaaaaaaaaaaaaaaaagaagctcacaccccaccccagagcagctccatcaggaagaagttatacacttcttgtataacttcctggattataaaatgtggcagctgcctgccgatacagtgcaaatgaatgcaaatcagttgccaaatgaaattggaaaaatcttgcaccttctataagatttgcaaagtcagtgaaagtgacaagggaaatgccttgaatcccacgcaaatcactgacaaatgaggataacgcagagttacggtagttagtgcagaagaaaaaaccacaaagcgatgatttgaccacaggcaagcttcagaagcaaaagaggcctgcaggagctcttggaaaaaatggaaaagtcttcaaacatttggctgaggagatcctcctaggactgtagttacgagttaggcagttgttaataagactttcagaaaaattgatttgttctgtagtacatgattgcaactaaaacaaagattgttttaaacataagataaaataaacaagtgttttttttcaacttatatttgaagttcagggacacatgtgcaggacgtgcaggtttgttacataggcaaatgtgtgccatggtggtttgctacacagatcaccccatccctaggtattaagcccagcatctattagctattcttcctgaggccctccctcccacaagtgtttaatcaaatcttttttattaaacttattatgaaatattgttccattttaaatggattcccttttaaaagaccttttctagtgctgctagcctgacaagtgagcccactgtgtgtgttgtgtacgtgtgtgtgtgcgtgtgtgtttgcacgcttacacatcttcctgtgtgcagcctgcatgcagcagtccccttgccttccagccacataccgtcaagacatgggctgaggttaccggctgcatgttatattgaacaaattagcaaatgaagctggtatccacacagtgccatttctcagtcaccatccccagaagagtattttgtattttatttccaggaatggggcataagttcacaggaatactttcccctcctcccccagtgttccttaaaaaaatcatgctttgtgtttgtaccttgcactttcagctttgctgaagggcttacctggcattatccatttttaccccacaacaaccttgtgagagtttccagcaggaggtatcagccccatcagacaggccgaggtaaagaaaggctctgtccagcagacccagttcctctccaccctcaaggcttctgcctcccagaccaagcacctgtgatcctgccctgtcagtcctgcacttaaactgacagctctgacgctctggggtcagcttgcattacgcctatcacctccatagctcagctccatagtgtgatgctactcagcaacccaacacgttaagatgggggcgcagaaaacctgaacacacagagagaatctaccgtaatgaagagcaggacattatagtggacaacaacaggattaagcaccaaattagaagccagaagtgggaagttcccattccagcctcactcctcactagttgtgtgactgacttcagagagcaggtcattcggccatcctcagcctcagtttccttgcatttgaattgaaaatcatttttaaaaatgtgtatcttatttagttctagaaagggccttagtattaaaatctcagccctgtattgaattatacaagagtatttgaggagcaaatgagctcatggaaatcttttaaattatgaccctaaaaaatgagatgaagggtcattgttatctacaaaagacactaaaaatctcatttatgcccaaataaccaactcttctttaagcaaaagcatatttgagacccaatcattttattagcaatagtaaaaatcaaatgaaaagaaaacctccactgtcatacaaacccagtcaatgcatccttttctttttgtacgtcttctatctcattccctgttcacagttaatctgacttaatttaattataatcgcagcatatattatattgtgatttctgcatttacccatgttgtcatatcacccaccaacaaaaacagaaaaaggcaaaatatgtaaatataatttctcatttccacatctgatgcccaatctctttccatagacaaacatagggtaaaacgtccttggaattgatgtcctataagacggagataaggagaaaggcctggttggctattgaacctctacagctatctcataaaacactttaaaatggcagaaatatttttatccatatcagcccatgtggcagccactagccatgtaagacccgtgagcacttgaatgtggcaggtgcaactgaggaactggacatttaattctatacacttttaatttatttacatttaaatcagcacatgtgggtagcggccactctattggacagcacaggagtgcctggctgagcagagagctggctgagtttcagcaggagatccgagcacagaccaggttcccactcagtgccagggtccctgaggcccaagactctgcacccacccaggcatacttgtcctttgtcactttctggctgcctagtgttcatttccccttctaaaagcagctggatttcatttggtgacctactcttttcatgtcatgtccttgaggcaaacctccccagcatcttgtctctcactgaagagagtaaaaggggactccttactctttgggaatgggtctgtggcccaagccccctacccagatggttcctccaggactttgagtacttagaatccagaatcactcgagttgtcctctgcagtggcagcagtggccacatgttgccagccacatggaggggacgaagatttcccatccttgggcatcttgagcttcccaaacccgtttcttcagcccacattatatgtcccataaatcccttttaacatagattattcagacactgttgtttgcagggtaggaaccctaacaggccccaaagatgagccagggatggttctgatcattctccctgtgtgtcctcaacccagatgtgctccaggaacttcctcactctcatttccattcttcccctggtatagtctgctcacccagaactgatagcatggctgtttaggttttcagcctgaagcacactgaaggcaaatggtgcgacaggtttttctttttgggaaaagtgcgtctccccactttgaatctcagcatgaccaatatctgtctaggggcctgctgttcatggatggatgtgctaattcagagtcagctgagaagcccacctcaacctccaaaagcttttcacctggactccccaccaccccctagcaccagcccataaacatcttatttaagccaaggaaactctatactggaggctggagggatctcttgaagagcttgtacatctgcttgaatgctcaaaggatcagccaggaccaaagtatatacactaccagacgaaagtatcccttcaaaggactcgcactctgctagaggagcacattcccaagactccacttcactcatttcatctgcgcagcagaacccagcaaggcaagccactccgcttttcatatcctgacattctgaaggcaagtgctgattaccaacagcgcaaccgtgaaacagcaccacggggaacactttttaacatatctacctaattagccccttataaagtgtaatgtgatttcttgcctcatcttgtcattagtttcatgagagtctttaagaaatgacagagtcagaagggagaagaaagaggcatgtcacacccaactccatgtgcttcctgaatggcccaactgtccttgaatttagcaaggtgcacatgaagcgcccccgagcttggcacaagggcttgactgctttaacagagctgtgggaagagttcccccaagcaacttacatgctcatgaagataatgcatagaccccaataactgcatgctccattccaaaatagctttggagaaataagcaccgatgtagccataaggaaaattacgttcaagtctcagccaattcatttataaatctgtaccttgggaaagccatacccagtaagtctactcatgggcctacagcatgttgataaggccatgagaagatgaccgtaaaagtgtgtatcacagtcattgctaatatgtattgagcgttttactagatgcaaagcatctttgggatgatttctttataacacagtcaacatggtcaaaaccattcattcattctgattcaaatgtcagggacagtctccctaaaagcaacatattcggagaggtcttgcctcatcccctgatcaaaaattggcctcttctttcattctctcttcttagtccttgaaacagttagagtcatatctcatgttaaggatttggctttttaattcccatctcccccatcagattgtaaactctgcaaggcaaagaccacgtctgttttgttcacccgatttcttaacataaatcctgccatctaaatggtgatgaataaatattaaaatgatgactgcctgctttgtaggcgagagaacttccagaagacccccaccatggcagataaactgtctatatttaaagaagagagctgcagagtgagactccttaaactactgccttttatttcaagcattccatacagtagggacacagccataaagaggacgcactctattgattgaagagtatattagtgggagaattaaattcatgctcctggattatgttaataatattatttcctactaacacatctgattactgtagatttcaatatataatattagtcttcttagaatcaacattaggtatgatgatgttagctataatgactttagctagattcttttattcgcttaacacagattaatcaaatgcctcgtgtgtagcaggcaccatgttggtcccaagtagtatttgcaaaaaaaatgactgaactttattcttagggttttgcggggggggggggggggaggacgggttgggttttttatttttttgttttttttgccttttttttttgagacagagtctcgctctgttgcccaggctggagtgcagtggcatgatctcagctcactgcaacctctgcctcctgggttcaagcaattctctgcctcagcctcctaagtagctgggattacaggcgcccaccaccatgcctggctaatttttgtatttttactagagacagggttttaccatcttggccaggctggtcttgaactcctcaccacatgatctacccgcctcagcctcgcaaagtgctgggattacaggtgtgagccaccgcacctggcctattcttagggttttggataacagtctgaacaccaatatcatataccttataccacctgctcaccatcccattctcactctgttttctttaattttttaatttgttaatttttgtgagtacatagtaggtgtatatatctatagcgtacttgaaatgctttgatacaggcctgcaatgcataataacacatcatgctgaatagggtatccatctcctcaaacatttattctttgtgttacaaagaatccaattatactctttgagttattttaaaacatataattaagtgtaattgattacaagtaccattttatgctaacaaatagtaggtcttattcattcttcctattatttttgtacctattacctgtcctaacctgccccctgccccacctgtcccactactaatcccagcctatggtaaccattcttctactctctatgtccatggagttcaattattttgatcttcagatcccataagtacatgagaagatgtaatgtttgtctttctgtgtctggcttatatcacttaatataatgatcttcatttccacccatgttgttgtaaagaacaggatctcattcatttttatggctgaacagtactccattgtgtaaaagcaccacatttcgtttatctattcatctattgagggacacttgggttgtttcaaaatctttgctactgtgaacagtgctgaaacaaacacgggagtgcagacatctcttcaatatactgatttcctttcttttgggtctatacccagcagtgggatggctgaaccatatggtagctccatatttagctttttgaggaaccttcaaaccactattcatagtggttgggctaacttacattcccaccaacagtgtatgagggttcccttttctccacatttcaccagcatttgtttttgcctgtcttttggatacaatcgattttaacagggatgagatgacatttcattgtagtttttatttgcattgttctgatgatcaatgatgttgagcaccttttcatatgactgtttgccatttgtatgtcttttttgagaaatgtctattcaaatatcttgcctattttttgatcagattattagatttgtttttctctagagttgtttgagctccttatatattctggttattaatcccttgtcacatgggtagtttgcaaatattttttgcccactctgcggggttaccactttattgactgtttcctttgctgtgcagaagctttttaactttttaacttgatgtaatctttcattttattggtgttcttatttacaatcaatgttaatattgataagtaagaacttactcccgccattgtgttaacttgttttctagttgttctgtgatgttctctgccttctttctttccttcctttagtgaaagtgatttttctctagtaatatgatttagtttctagctttttactttttgtgtattcattgtatgtttttatggtttgaggtcactatgaggcttgcaaatactatcttatgacttttttttttccttctgaaacagagtcttgctctgtcatccaagctggagtacagtggtgtgatcttggcttacttcaacctccacattctgggttctcatgcctcagcctcctgagtagctgggattacaggcatgtgccaccatacctggctaatttttgtatttttagtagcgatggggtttcgccatattggccaggctggtctcaaacttctgacctcaagtgatccacccaccttggactctcaaagtgctggcattacaagtgtgagacaccatgactggcttctttatgacctgttactttaagctgataacaacttaacattgtttgcataaacaaagaaacaaagaagcaaaaaaaaaggaaactaataaaaactctacgtcttaactttgtcctgattttaaactttttgttgtttctatttatatcttatagtactgtctatggcttgaaaaattgttatagttattatttttgattggttcatcatttagtttttctacttagaataatagtagtttacacatcacagttacagggatataaaattctgtgtttttctgtgtgcttactattacccatgaattttgtactttcgcatgattacttactaacatccttttctttctgattgaagtactccctttggcatttctcataagacaggtctagtgctgataaaatccctcagcttttgtttgcctgggaaagtctttattttttcttcatgttagaagaatatttttgctggatatactattctagggtaaaagtttctttctttcagcactttaaatgtgttgtgccactctctcctggactttaaggtttccactgaaaagtccactgcaagacatactggagatccattgtatgttatctgtttcttctcccttgttacttttaggatcctttctttacccttgatctttagaatttgattattaaatgccttgaggcagtcttctttggatttaatctgcttggtgttctgttttcttgtacttggatattgatattattatccgggtttcgaaaagtctctgttattatccctttgaataaacattctacccttatctctttctttgtctcccctttaaggccaataactcttagatttgtccttttgaggctattttctagattctttgacatgcttcattattttttattctattttcttttgagtcctctaactgtgtattttgaaatagcctgtcttcaagctaattctttcttctacttgattaattctattattaagactctgatgcattctttagtatgccaattccattttttatctccacagtatctgtttgatcattttgaatgatttcaatctctttgttaaatttatctgatagaattctgaattccttctctgtgttatcttgaatttctttgagtttcctcagagtggctattttgtattctctgtctaaaaggtcacgtatctgtttcttcaggatgggtccctgatgctttatttagttcatttggtgaggtcatttttttcctggaatgtcttgatacttgtaggtgtccatttgtgtctggaattgaagagttaggtatttattgtagcctttgctatctgggcttgtttgtacccgtccttcttgggaaggcttttcacatatttaaaaggccatgggtgttgtgatctaagttgtatctgttttagggggcaccccaagcccagtaacactgcagtttttgcagactcagtggtattgccttgatgatcttggacaagatctgggagaactctctggattatcagagagactcttgttctctttcttactttctcccaaagaaatggagtgtgtctgttctgagccacctaaagctgggatagagtgacataagcacccctgtggccaccatcactgtgactgtgctgagtcagacctgaagccagtgcagctctgagtctcacccaaggccgactgtaaccgctccccgcctagggctcaacaatcagcagacggcaaagccagccaggcctttgtccttcccttcagggcgatgagttacccccagtttccaggctggtccagaggtgctggctgggagcctagctggtgttctattgtactgtggctgagctggcactcggacaacaggatgcagtctttctcactctctcctaccctttccagaggcagggcagccttgccccatggccaccaccccacaggcctatgcggagtactttcagattaccttctatgtcccttgaaggcccccagggctcttcagtcgactgtggcaaatgctgcctggcctgggactcaccctttaagacagtgggctccccctggcccagggcaagtccagaaatgccttccaagagccacatcccagaatcaaagattccaaaagcccccttggtgctctaccaccctgtggctgtgctggtgtctcagatgcaagacgaagtcccttctacattttcctctgcttttctcaggcaaaaggagtctcggccatggccaccacagctgataatgtgctgtctcccctgaagccagtaagtctcagaggctctcagtgtagcagctgggtattactgttaacatgggctacccaaaaggggcaagagaactcaaataatatatcactaaatagtaataatacttatcaatggaaagataaaagattatgtcaaatggaaaaatacacatggtattctgctaatgtgtagaacataaagttctatcaatcccaacactacaaaataatacttatatagctaggtttgtcatagttgaaagcaaccaggccaatttcaacagaaaaacaatttaattgagaatattcggaaattcacgtacatgttcggaggcttagggaaccaaaatgagggacagcataaacactgccccaaatgacacagagaatggtttgacctgccactggccctggacatctccaccatcattgctgcctctgaaaacctttcttgctaaaactgccaattcttccagagagaggaggcccccagagccatgttgttggtggatgggggcttctgagtgacagggcccatgcacatggctgtgccctagtgacaagagaggcagaaaaaatcaggcactgactcatctcttcataaagtggggaagaatgcagacaaggcagagactcagatgtggggtagccaaggagaacaaccagtatggattgcactggcacatggagatgggcgagaatccctggcaagagcagcaatgcttattggactagatgggaacagggaaagtttgaccttatatttctttgttattctgatattgttttgcaataaagccacttaagcaaatggcttaaggaggctgagtgcagtggctcacgcctgtaattccagcactttgtgaggttgaggtggcaggattgtctgaactcaagagttcaagaccagcctgggcaacaaagcaagaacccacctctacacacacacacacacacaaatttaattaactgggtgtggtggtgcatacttgcagtcctggttactcgggaggcttaggtgggaggatcggttgaacccaggaattcaaagctgcagtgagctatgatcacaccatttctctccagcctgggcaatagagcaagaccttatctttttttttttaaggcttaaaataagagaaaataaagaaagacaataaccaaaccccattcaagtgctgcctgcccctgaagcccagcgtgggttggtggcaggcgccctgagcttgaggcctgattgtggagtgcaggcatcagactcagagggcctgggaggctctggagctttcatcagttcacaaacctctgtcacagcctgataacaaagttgtggaaactgcaacaaagaatcagaaaaaatggggaattgggaaatcacagcaaatatttttcccatgctctcaaataacagaaagtttactgaaacagatcactttcatcatgaaaactgcagtgaactagctcaagagacatgcagcagctcacagtgtgtgctttgagtagactttcctggaagaagcagcacctcctagaacacaaattctagcttcatcgtcctgggtcagctttcttgggacccgggggacaaactccattaacttttcctcctggctttgcattgccaaacagaacttctggtcaacctcctttcagtcccagcgacctcacaatgtcaatggcctccaagggtagcagtgcttgttctggcagcttctccatgtggaaatggtctttagaatcctggaaggaaatcattttatgaagcatgcataccgtgagaacacctgacccacagtcctaggctcagtcagaatctaccctctgaaaaaaaatgtttcttctctggagcgtgggtgtaacataagcatctactgaatgccagatagttttatattttttatattttaatttttttagagacagggtatcactctgttgcccaggctagggtgcaatagtgcaatcatagctcaatgcagcctcaacctcctgtgctcaagcgatcctcctgccttagcctcccgagtagctggaattacaggtgtgtacaatcatgcctggctagtttaaacttataaaaaaaaaattaaaaaaaaagatatgaggtttggctatgttgcccaggctggtcttgacctcctgtcctcaagtaatcctctcacctcagcctccaaaagtgctgtgattacaggtgtgagccgccacgcccagccagcaggcagtggtgacatataggagtcagataagaagtgaacaagacagactaggatctccacgaggtggtggctttgtctgactgactgagattgatgcagtaatgatacccaaaggggaaactgatgaagtaaaatgagggggggtgggcagtttcactcaccttgtctccttctggcagccaagagggagaggtgggcagcaccgggaggccgggatggttttgctcagggccctgactgcctgaactgcttctctaaataacctgaggcctctttctgcactcaagggccccatatcctctgatccctgtgttgctgcacccgaatcagcccaggctggggcagcatggattccaggtggagcagctgctgagtccctgctagtttctgagaatagctcacaagagcagaggtgagattctgcagagctttgtgggtctctaagccagtcatccatcttcctgccacctttggagccctccagggatgagcagaacccatgtttcatgaacacataaattactcagtgctccgtaatgcaccctgtaagccacaaaggccacagattaaatcatggcagttgtgaggacagagcctgaggctgtggctggaccagtcttgtgcaagtggccaagtggagaggggtttcaggctcccggtgccagccacagcctcgtccctcttacccaaggcccttacaatcccactgtgtcatttcctttgcacctgttgtcactacaccctctctactgagctgtaggcatcgctacaggggctgtgatgtggcagccgtgtgagcacaacctcgcagcctggaggtggaggaaagaggactggactcagagcctgaggacccggtcccattcccacactctccccagctgcctgtgtgacctgaccctctgtggaccttcatttccttgtctataaatgcaggaagcggggaacataaaggtctgcaacactgaatgccttccatggaggatgcagccccaccaaagggcacttgagctctctctcagtttgtgccgccaaatgacactcttctgtgggtgaaattccgccagcagcccccagctacctcggaagctttccactcctgacgctgatctcaacggaaaccttcctccaaaagcagcattttcagggctggggtgatcactgctgcggcaggggccccaccatgtgacagagaggcccacggtgggcgtggggtctacggagcagttatagctcctgtccctccagccacatctttattctgagttcagcccaaccttttccatgaagtttctataaagttcttctgtcaccaggacagaagtttctgtgtttgacctggggcagatgaatcaggcaggaggactgaggaagacatcagggttctccagccaccttatgggggctcctgtgaaacaggaatggggatcaacatgtccccccacctcctaccctggattgataagggaatcacctctggttgtcacatgtcatacagaggatgcctcctcactgagataccggtggagggtcttgactgccaggttcttggcattttgaacaaagaattggacaaaacgcacagcaaagcgaggaaataatgaggcaacaaaagcagagatctattgaaaatgaaagcacactccacagggtgggagcgggtctaagcagcggctcagtggccttggttacaggatcttctggggtccaaataccctctagaggtttttctttgtccacttggtgtacaccccatgcaaataaagtagtagtctgtcattagtgtgattggttgtggaaaacaaccaatcagaggctgaagtgaagttacaaaggtcacgttctatgtaaacatctgattggttgtggaaagcaaccaagaagctgaagtgaagttacaaagattagactctatgcaaacgtctggttggttgtggaaagcaaccagtcaaaggtacttttaattttccatctgccatgaagaaagtaagtccgcgtggtgacgggggaggaggggaggtgaaaagggagtaacctctggttcttttgttacttaggtgtggaaagttggggttttccttttgatacatatattttttgctttttaataagctttttttagatcaattttagatttacagaaaattacagaactagtgaagagttcccacatactccacacccagtatctcacactgttaatatcttatgttaaaatggcacatttgttacaattagtaaacctatattgatatattattattaactgaagtctacatttttttccaatttccttagtttttaacctaatgtccccttttctgtttcagaatcatttgatttagttctaaaaagtcagcataaatcggccttaggttccctgtctacagcccctattctcctgcctcaattgtggctcaaatacagagaaccaggttcccaggccattcaaaagaaaacaagctagctaggcatggtggcttttgcctttaatactagcactttgggagtctgaggcaggaggatagcttgaggccaggagtttgagaccaacctgggccatgttgcaagacccccatctctacaaaaaattaaaaatattagccaggcatgctacaggtggcatgcacctgtagtcctagctactcagaaggctgaaacaagagaattatttgagcctgggagttcaaggctgcagtgagttataactgcagcactgcacttcagccttggcaacagaataagaccctgttgaaagaaagagagagagcaccaaagagagagagagagggaaagatagaaaaagagagagacagaaagaaagagaaagagagagagataaaaaggaaagaaaagaaagcacactacacgtggtaggatggggcactcacactctaggttggcgtgggctcagactcttatgcagcacagtcatagcagagggatcctgccacgtcccctggagctcctttgtggattttgcaccacctcgcatccattcgcgtttctccctgaagggaggaatttcttagtagctgtctctctacttccctccaccatgctctttagaagggatccagcccacattccaaaaaggagcctggccatctgcatactgaaggggagggcatgtgacccaggctatcccatcacagtgaatcccaggaactgggcagaagcaactagggtcaagagaagttttctctttttttctgaggctaagaccagaatggtggtgctaagactaggagcagatctgtatcataaaaattgtttattttacttatcttccttactctttgtccttttctccctccacagattacttgcacgtactcattttaatagagggcagtcactcataattgattaactgcatagctggactcctgggtgctggtcgcaagagtaatctttgattttctttagaagaacaatgatccttaggtcatgcagacctccttaatggtatctggaagtttgattgactgagggacacgaacagcttcggtcaccaggaatctcacctcctgcatacctcccttacacatcaaagccccagttgtgttcaaagacaagtcagattggagtttgcctctcccaatctcacactttggttgaatcaaataaacctttctctcctcctaagcactggtgtgtcagtgtttggctaactgcgcattgagtacttgagtactggaacctagcgtctgggatcctgcaagactagaacctacgtcttccggctgccagcaacacctcttcctctccatggaaacagatgacttcctgcaattccagactcaacctttggaagacaaagaccaaccctgggtggcccagattccttagtgactttggaaagttagcgcccagcttttagatctggagaccaaggaagatagagcaagctgagagtaacattcattcacacacacacatacacacatgcacacgcacacacacacacacacacaccaggcttgaggaaaagaatcccatgagaaaaataattgcaagacaggcttaatagctaacattgactgagtgcttagtctttgccaggcactctgctcagccattttacatgcattttttttttaattctcaataacccagtgatgggagctattactgtacctgttttacacatgaaaaactgaagctcacagacactgagccctttccccaaagctgcacagctactgaatggtgtggccaggctgtctgactacagaccccacgcatattttttcttttacagaaagaataaatagaaatcatttgttgaaatagcacattatagacaacttcctgagttgcaaattttacccctcttttactcagagatactttaagacttctcttttaaggattttaagttgcttagagtggagcttgttaagctgtacacacacgtgagtcactggggatcttgttaaaatgcagattctgatttgcagatggggatgccctgaattcttggtctctgaggccctctcaggtgggatctctgatggtggtctacacacacatcctaacacaacactcacacacacacgtaccgtagtgccaatactgggagactgaaattctatattttatatgcgcacctaagcttcctcagaaaaagaaagaaatgcaaatacttcatcactaagaatttaaaggagcacattgtggcttccagcgtcagaagcaggaaccattaatctagtggggatgacaggaaatgaaatgtaagaaagctgattagcagcacctttaaaaattagacagctcagctccagaaagggaaataaaagtttggaatctgagctttccctggcataaaagggcagaatagctcttttcaaaatctcgagtgacttttagttgttttgttgttgttgttttctcatcacctccttaaaatcagctcttacactgcctcttgggggtgcagataatccgagcagacttggactgctgccatgaatacacagtctcactcctttgctgctcctcaatattttattttctttcctgtggagaggtcggcgaaggtgaggttgtgctgctggtgattaattgtggtaataaacagggtgagagaaagaactggaaacgcgagaggggttggagatttatctgaaaacatggatcctgggtaaataacgggatgactgtgagatgattacaggctgaattgtgtcctccccaaaagatatgtgcatacctcagtgatattgcgagtttagttccagaccatcaaaatagagtgagtcacgcaaactttttggtttcccagttcatagaaaagtcatgtttacactataccgtagtctattaaatgtgcaatgccattaggtctaaaaagtgtacttaccttaacaaaaaaaatactgctaaaattctgacacagaggaagaaagtaagcatatgcttttggagaaatggcaccgataagacttgctcaatgtggggttgccataacttgtaaaaaacacagtacctgtgaaacccaatacagcaaagcacagtataaggacatctgcctgcggtagagatttcagctcctagggccacagagtgcacctttggttgggaacagggtcattgcagatgtaactagttaggatgaggtcagactagaataaggtgggccctaatccaaaatgactggggttcttataagaagatgaccttgtgccgggcatgggggctcatgtctgtaatcccagcacttagggaagccgaggcaggcagattgcttaagctcaggagttcaagactagcctaggcaatatggtgagaccctgtccctaccaaaaatacaaacattagctgggcatagtggcatgcacctgtaggtccagtgaccagggaggctgaggtgggagaatcacttgagaggaggcagaagttgcagtgagctgagatcgtgccactgcaccctagcctaggcaacagagcaagactctgtctcaaaaacaaacaagcaaaaagaagatggccacgtgaagttggaggcacaggaaggacagccatgagataaagacggcagaaactggagccctgcagctgccagccaaggaacagcacagattccctgcaaactggaagaagccaggaggaggccaggaagcgttccctgcagagttcagattggccacggccctcccaacaccttgatttttgacttctggttttcaggacacaagatgatagatttctcatgttgaagccgtttagtttgtgacactttgttattacagccctagcaagctaataccatgaggttatctttccacctctgacaaactcctaaatccccctcccaggccctcctctacactcacacccctcaccccccaccccccaccaccacagtgattgaccaaaagggaagcaaggaatggggccagtgtgggaggcagtcaagcagagcttctcgcctccagtgaggaggcagtgtagggaagacactgaagagcctcgcaaggccccacctccagtccagctgaggggcctaaggacaggagggtgggaggggtggagggtagaaggggaggaggggaggagagtggaaaggggcaggggggaggggggagggtgcgaggggaggagttggggaaggaaggaggtggggagggtaagaggggaggagggcaggctcaaagatgcttcccgcctgctgtcatcagtgagtcagagcaccagagcctgaaaggggatgggaactgtagggctgagtttgactttgagccagaattgacaccccagggccaagagcctctcaccaggtgcctggagatctaatgaacaaatcaaggaggcccctaagcaatagaaggactggagatttggggatggtgaagctgaggctatagagtcccacagtggacgtgaggggaccctaagggattacccttctctgagttccctgtcctccatgcctttatattcctaaaaaagcactaaaatcctggtatcctctgagccgaaggctcagttttccatcccatccccaagcctcgtggaggccggaactcagctactgttggtttatgcactactcatcagctctcggcatctgtcccacaggctgggcagctccgggacactgcctggcagcaggggctgtgattccagctggagtttaaacacacaccctccaccagtgctctccagcaaacaaggacacccatcctcatactcccacctggagacactcgcacagcaccacaaacattcccacacacacggacacacccattctccaacatgcagagccacacaccctcacacagactcacacatgcagcacagtcacacacactcagcgtgggttcatagagcagccacccttgctcagagacacagacacacgtacacccacagccacgttctccagggcagaaacaggcgtcccctctccctccctctctcagacacatgcaggactcaggaaatccacaaaggccttcacagcagagctgggagattttatacatcaaggtcctcaacttccaaacagaactaattcatgccacaaataaaacagttacagacaaatctgcctagtgtggagttctacttggtgttgggttttgaggagggtcacatggctccttctcttcaggacccccacttctgggaaagcctccaggccatgccctcctcactgggacaggcaggaccctgcctccccatcctctgagcctcagggcaccgaatgtccacatccctcacgaggcgcttaaaaccagagagaaatcccggccctcaccaccacacaccaaagacagacgagagagggaggccgtgagaggggaccccagggcagtcatgattaaatgtgtggacactgccctccccagggttcctggagggcatcacatggggagggaccctgggtgccagctggtgaagaaaagggtgcttccagccgggctccagtatgacattgtctacacttgcattcatcatcacgtgaaggctcagacccctggctacattgccattgcacctagcccaataattattttatgtagaaaattagtgtgtgagccaactatgcatttaaacaaagctccatttgaacaccagatctgttttcctataaataccagtatgcaactgctaaaacaaaatagtaggtcctctgtgccatctagtagcctctgtgatgggaactattagcacaagaaattctaggttggccgcttggtgctaactgtgaaagggtgaaggatgggatctgacatgcgccaagtttccagctgcaaacaccagcacattgtcaaaatgtgttttgtgcttctccatccttccatcactcttcctaatgacaaaaataattaacacgttcatataaaagcacagaatgaatgggagtcctaatttatccacctatttcagggtcatgcctttatcaatatatgacaagttaatgggtcttaattaaaaaagcagcagtaaagcaatttaggaaactgaagggttattatgagtcatcactgtgacagcatgttttgtgcaccatggaagataacagatttgctttccatagtatcacagatccatcatcctgaaactacttgctctcggttgcagagagccattttcttccctttaaaagaagtgcatgagctggtggctgcttccagagtgacagcagcaatgcatgataggaaccaggaaggctatgggaaccagcgtgagggagggggcagcaggcctgaccacaggcaagggtcagggccctgggagaaagcatgagccaacggtcaggacaggaccgcacatcagggtcgttcccaacctgttgctctttcccaccaaaaaactcagtagttttctaaggactgtcaggatcctccccctccaccccgccatggccacacttcctccaggttcctctgagacctttccaggtgggcttcagccttgacctatagagacttgaacaaacactcacattgtttccaatggtgcgaggccgcattccctaagatgacactagtcctcttcatgtgcccgcatgagaaagctcaaggctgctaaaataagttaccatttctttcagccaacacctgaagacagggtctctgcctcccagcctctgtgggggtgggagtctaacttcaacaggaacacattagtaaacccaggtgggtttcacatggaccaccccacttcctgcttttgtagtgtttcacttccctaactctgccaagcccctgctccttccctccctaacccatcattctctcatgttatccttttctcagacagagtcttgctctgttgctcaggttggagtgcaatggtgcagtcataactcactatagccttgaattcctgggatcaggcaatacacccacctcagcctcccaagtaactgggactgcaggtgggtgccaccacacacagctattttttaaaattttttgttgaaacaaggtcttgttctgttgcccaggctggtctttacctcctggcttcaagcaatcctcccacttcactcccaaagtgctgtgattacaggtgtgaggcactgagcctggcccattctcactttaaaatgcccagtgacctccacaaatcaaagttaagttcaatttctgctgggctcttttcccagctgcaatagttgttactgattaaaatctgtccttaccactttagcgttcatctttgttcatctttgacaggactaagaaatctatttcagaaatatttctaaaatccaggtcttctttgtcattattttctggccctcaccatctcgtccctggaatgatgcagaggctgcttcatagccagtccccctactgatagctcatcttgtccatggccatttggatcatgtcctgcctttttaaaacaccctccaattgctccaatttgcaaagcagaaattaaaaactgagcatctgacaaatgtgtactttggctaactgtgcctttgtcatgatgttaaatattttccctaaagatggggtctcactcagttgcccagtctgtagtgcaatggtgcaattacagctcactgcaacctcaacctccctggctcaagccataatcccacctcagcctgccaagtagccgggaccacaggggcactgcaccacacccagctaatatatctatatatatatggttttattaccaacaaaagccctttggaaagctgaggagggaggattgcttcccgtcaggagctcaagaccaccctgggtcttcctatgttgcccaggctggtcttgaactcctgggattacaggtgtgagccactggaattcattataggtggtcttgaattcatttcatgggtaattgaatgattttgcataaaactgtagatttcttgcaagactggcctacagtcctgaatggcagcattgaaacagactgatcccatttaggcagtgtgtgcactcaccaggtggcccagttcccaccactccctgctacccttcactatcctcagttacgaacctgctggccccataggcatcagcgtttgccagccatcacaagtaggagaactgaggctggaaaaatggaaaatgagaccccaggacacagaagggttctaaggaaatgtgaagatgtttcttgctagcaaggaaaacagtctcagggactgagctgaactcacagttcagtgcccacagtgagtgcagtgagaggtgcatctccagagaaaagcaaaggccacaggaaaaaatgcaggctcagggctcctggtgccccgtgttttgtcacagagtaagaagccaagccttcctacaaagaaaggaaacacagcacgtctcctcagaactagcccatctttaaacttgacctagatggcattgctcagggtggccccttggaaatccatgaaagccagaaaagaggccaaggaggaacatggcatctctcactttccctgccgtgctttgagtattgaaatgtctgggcaggaattcctttgaaatgcctgaatcagagagtggatttgcaaaccaagtttctcctttatttttaaagacttttagcctgacttttactttgagagtcagggacacgtggaacataaattccgggtccaagagtcatgtgattcctggccaatgggaaaccacaatggtgcctcccagccctggctcttaacagcaccactgcgcagctgagccagcctcagaaacatgcgttaccctcccagacatgagcctctgtgtgccgcttctcccctctgtcaagtcgtgtcttcttatattaataagaaaaataaaatgaaatagtggtaaagtgttggagtggcgaaaatttttggggatggtatggagagataatgggcgatgtttctcagggctgctttgagtgggattaggggcggcgtgggaacctagagtgggagagattaagttgaaggaagattttgtggtaaggggtgatattgtgggactgttagaagaaacatttgtcatttagaatgattggtgatggcctggatacagttttgtatgaattgaaaaactaaacggaataagagaaggagaaaaacaggtattaaaggtctaagaattgggaggacccaggacatctaattagagactgcctaaggagattcagcatagtcctaccagcaaagattatttatttacttcaagagttaagagtggcagtttggggatagcaccaggaaatatcagctgtgatggcttggagaaacagtgtaaaccggcagtgtaaacaagagcagggcatgtatgagtagttgagaatggtgaataggagtttgactagacagaagatagtagggatgacatgatcagcagggagaccatgtcatgtgtttttatgggaactatgccaagataggtaacagatgaggatgaaatttgggcttgactgaagtaatgggggctgtctgtgaagtcttgcagcagtacagcctaggtaatttgctgagcctaatgggtgtcagggtcagtccaagtgaaagcgaagagaggctgggtatgaagggtgcaaaggaatagtaaagaaagcatgtttgagatccagaacagaataatggattgtagagggaggtattgaggatacgggagtatatgggtttggcaccaaagagtggataggcaaaacaacttggttgacaaggcgcagatcctgaactaacttgtaaggcttgtctggtttttggacaggtaaaatggggaaattgtaaggagagtttataggctttcagcgaagggagataagggtgattaggttttaatgagatggtaaggggtgcatgatcggtcaccaaggagggagtagaggtatcctatacttgtgagttaaggtggggggatacaagaggaagacgcaaaagaggctttggattgggaagaagggtggcaatgaggtgtggctgtagcctaggaatagtcagggaagcagataatttaaagtgtctgggcctaataagggaactgggcaggtggggataactaaaaaggagtgcttaaaagagtactgtctaagttggcaccagagttggggagtttaagaggtttagaagcctggctgtcaatacccacaacagttacggagacaatggaaacaggcccttgaaaagaaggtaacgtggagtgggtagcctccatattgattaagaaggggacggacttaccctccactgtgagagttacctaaagctcggcatccatgatggtctatcgggcttctgaggcgatcgggcatgtcagtcttcagccactaagccgagaagatctgggaagaagtcagtcagacagccttgggccagagttccaggggctctgggagtggctgccaggtgagttgaacagtccgatttccagtggggtcccccacagatgggacatggcttaggaggaatcccgggctgcgggcattccttggcctggtggccagatttctggcacttgtagcaagcttctgggggaggtggtgctggaggaatgcctggccactgcggtttaggcatttggaaattcttgtgtgctggagatgtggctggggtttgtctcatggtggagacaaggaattgcaactcagaaatatgttactacttggctgcctctactctattattgtacaccttgaaggcaaggttaattaaatcctgttgtggggtttgagggctggaatttaatctttgaagttttatttaatgtcgggagcagattgggtaataaaatgtatattgagaataagatggccttttgaccttttagggtctagggctgtaaagcatttcagggttgctgccaaacgagccatgaactgggctggatttttatatttgatgaaaaagagcctaaacgctgtctgatttgggataaagaaaaaggagcattaaccttgactatgcttttagctccatccacctttttaagagtaaattgctgggcaggtgggggagggctagtcaaggaacgaaactgtaagccggactgggtgtgaggaggcgaggtgataaaaggattacagggtggaggagcggaagctgaggaggaattgggacctagctcagcctggagaggaggggagaggtcagatgggtctgtagaaaaggaagattagaaagactcagcgacacttggggttgggactgaggggacaggtgggagggaaagaaggaagatttgggacgagttgcattgggaacagagactagggagggaccaatgtgtaaaagaatgcctggacgtcagcacctcagactgtttgcctattttacgacaagaattatttagatcttgtaggatggaaaaattgaaagtgctgttttccggctattcggaactactgccaagtttgtattgggatcaagcggcattgcagaagaaaataaggcatttaggttttaggtcaggtgtgagttgaagaggttttaagttcttgagaacacaggctaagggagaagaaggaggaatggagggtggaaggttgcccatagtgaaggaagcaaggctagagaaaagagagagtagagacatggagggaaggggttcgggggttcttaccctccagaaaagtgggaaagaggtgggggtgcagaaataaggggttggggtgcagagataagaggtcagggcacagaaataagggatcagggcacagagataagaggtcgggctgtggaaataaggggttcttgcctctcccccagaaaagcgggacttgcctctaagggtgaaggagaaggggttgagaggttcttgcccctctcccagaaaagcgggacttgctgctgacggtgaaggacaagggtttgaggggttcttgcccctcccccagaaaagtgagacttgctgctaacagtgaaggacaagatgttgaggggttcttgcccctcccccagaaaagtgggacttgccattaagggtgaaggagaaggggttgaggggttcttgcccctcccccagaaaagcagagaagaggtagagacatggagagaaggggttggggttcttgcccctcccccagaaaagcaggacttgccactaagggtgaaggaccaaggcaggcgtccctgtgtggtccgacacctctgaaacgtgggtgaataatcagagaggcatccctgcaatgattaacaccaagggaaggctgccttcccaggccgtgaccggcgccggagttttgggtccacagataaaacgtgtctcctttgtctctaccagaaaatgaaacgaattgaaattaagagaagggagagattgaagtgtggcaccaagattgaaaagagaaagaggttgagggatattgagggaggttggagaagagagtaaaaagaggctgctttccagatttgaaattggtgagatgtttcttgggctgcttggtctgaggacctgaggtcgtaggtggatctttctcatggagcaaagagcaggaggacaggggattgatctcccgagggaggtccccctatccgagccacagcaccaaatttcatgcgagtccctgtgaagagaccaccaaacaggctttgtgtgagcaacaaggctgtttatttcacctgggtgcaggcaggctgagtccgaaaagagagttagtgaagggagataggggtggggccattttataggatttgggtaggtaaaggaaaattacagtcaaaggggggttgttctctggcaggcaggagtgggggtcacaacgtgctcagtaggggagctcttgagccaggatgagccaggagaaggaatttcacaagacaatgccatcagttaaggcaggaaccagccatctggatgtgtacgtgcaggtcacaggggatatgatggcctagtttgagctcagaggcctgacaccctcctatgccttgcctggcccctgactgcctagggacctgcagtctatctggtcctctgtaaagctctttttagttccgtgtaaaacagcaggagagtaaaattggggtccagatgaaacagaactattcaggctgatatccaagaagcgccctggctccttaacgtgttttccttttcattggcctcttaggactcaggtttgccaaggctcagaagcaagagccaggagtgaatattgcacataacagcggtgaacctggcctgcttctgagtgtgcaaaagccctttacacaggatttcctgaggtcagcccaagcccaggctcctcaccctcccagaatgcctcagctagctggcaaaacattgtaagtggaagtagagatttgtccagtgtcaaaaatcatttcacacaatagcaagacacaccctgggtggaagtcactgctacagaaactgtgcccttcctccagtcttcatctcggcacatctgtgaccacaaacgctgtctgtctaaattcacatcttgttcaattttagattcatagttttctctactcaaatactttacgcttgtaagacatgttgtgtggaagtgggttaaacttgtcttttaacatcaccaataaccatcttctacatttttttcagtcattaatttgatatcttcactaaaagaaatgccagtaatttgagggttttcagagtaaagtgccttgagctcccccagacagagaagaagcagaggtgtcactgttattattctgagctgataggaaacacatcatggattggaggcaaggaatcagccaccacctgcccggcacgcacatagagcaggtgttggctataattgcctctagacttcctgccatggtcagttgaaagtcaaacctgtaaatgctgcctgactgcaatagaactggagtccacagacatttctgcaacactgcctggtgaaaatatactgactgggtgggatgagatggagggcgcgtatggagcagacacgactggaatagcaaccaacaggctgtcagtcttcactgccttttctcgtcttccattttttttgattctatgaccaaaagagatgacagacctgtaagaaaatggatttggtcatttccggaagaagctttttctttgatctgtctgagagcaggtcagtagaaggtatttttgttaacctggatcctcaccatggatatttcctgagcttctacatggcagttctatgttttaaagttccctttgccgtggcagcacaactgcacaccagacagtcacccttcttcctgagagccactgtgatttcacttcaggctcaaggtgtcctcagcagatctgagggaggactaaaacagatatacacgctttgcttttctgcatcaccaccgttcacagactcccaggagctcctgcagtcagtagaaaggagatcattcaagtggctttcacctagtaccaaacccacacagccttcagacccagcccctccaatctcccgacctcctgggcaccatccctggccaacctggtccagaatggcctccgtcctctagaggccccaggcaccaagatccacaccctctattccagagcattcttggcttcaagttaggtcctatttatcaaacatttgtctagagagcagccccagcacataagtgtgtgtgaaccgcagagtagaggcatggcccctgctcactgtcccctctgactctgggcctgggtaagactgggctccccaaaagcaatataagtgtaccaggaattttctatggtgctcctgggagaagtaggaaggaggagggagacggagaaatcaagtaggggtgtgattcaagccccattcttgcttgcacctgcagcgtgactcccagtgtgagctgaaccttagagcttgtccggacttgaatcaaagcaacgagcctcaggtattggtgtgggtcaagatggggagacataaactccctggagcatcacttccagctttctgcacctgtgaacaaagcccaaaggtgggtcactgaggagagacacaggtatggtattagttgctgaagaacacagatgctgaggagtggtcctgggtgggaggggttgggcggagcaaacaccagcttcacggccaccttcataggccagtctcctgccaggggcacgagacgctccaaggagccagaaatcagagctttcatttcctttgtgactctaccaggtactcacagaagcaggaagggagaggcattgtttaaaaaagcaaacacttatatagcacttactatatgccaggcaatgttccaagcattttataagcactaattcacttagtttctcaatgtctcaatttccttataggtaaagtcaagctaataatattagctacttcacaggcttgcagggaagctaaatagcctatgtaaggttacagagatgatctgccaagagttgaacctgggcagtccagctctgaatctaaatgcttaaccaaaccattaaaatgagtgcaggctcataggaccagacagacacaggtgcaagtcccggtttatgtcaataaaactgcatatcatccacaatggttgaacactcccaccaacagtgcaaaagcgttcctatttctccacagcctcactagcagctattgattcctgactttttaataatcactattctaactggtgtgagatgattcctcaaggatctagaaccagaaataccatttgacccagaaatcccattactgggtatatatacccaaaggattataaatcatgctactatataaacattctactataaagacacatgcacatgtatgtttatagcagcactatttacaatagcaaagacttagaaccaacccaaatgcccatcaatgatagactggataaagaaaatgtggcacatatacaccatggaatactatatagccataaaaatatgagttcatgtcctttgcagggacattggtgaagctgtaagccatcattctcagcaaactaacagagaaaaccaaacaccgcacgttctcactcataagtgggagctgaacaatgagaacacatggacacagggaggggggcatcacacaccagggcctgttgggggtggggggcaaggggaggaagagcattaggacaaatacctaatgcatgcgaggcttaaaacctagataacaggttgataggggcagcaaaccaccatggcacatgtatacttatgtaacaaatctgcatgttctgcacatgtatcccagaacttaaagtaaaataaaataaaaaatttaaaaaactgcatatcatctctgagtcttcactttcctgtttttgaaattggtttttcttaaaaaacaaaaaagccactaatacctgtatctgtgtaagaaatgtccagcaggtgctgaagccttgctgggaactcagtaactctcagggatcattacaaaaatcctcggtaaaattgactgcctgcaatctttgatacagcaatgcctgtccccagtagcttccagtggcagatgtgttatgtgtgtgcatatgaaaaaactaaacatgtaaaaaaacccaaatccaggccacccagtacattcatatggcattacccaggtctacacccctggggacagtcggccatgcctggagacattctaggttgtcactgctgagggaagggtgctgctggcatctcatgcgtagaggccagggatgctggtaaacaccctgcaatggcacaggacagcccattctgtattctttctttccaacataacaataatgataaaagcagctgccaacacacatattcaaggcacaggtctgagtatattataaaggtgatctctaaataacctatctctgagaaacgatctccttttagcccctttacagttagggagaggagacttaaagaggctgagtaattttccaggatcacacagcagacagggaagcttggatttgaatcattgtcatgcagagtccaggacttacactcttcaccattatacattcgttcactaaactttcctaagtttgaccacaaattagaaggcagaaaatgaaaaagcatgtaacttggtagttctagcaactgatttacttccatcaaaggccctttggttctagaaagctttatctatgtgttaacgatagcagtatattaaattatgggctaagtgtggtatcaaattgtaaaataacctatgaaatctaagctttactttttctcatagttattaatggctggggtcagactctcttgggagcccctcaattggaagaaagactgacaagaacacacacacaggacttgaaccaaacccatgtgaattcaaagggaaggcaggtttattatctttcgctccccagagatgaagtcagccagcttttctgttcatcactagggaggatattaaacacaattctttacacgtggggaaaaaaaaataattgattctgagaacagctttggtgaaatgggactttggttggaacagcacacacataacctctccaagacagcaggtcatccgccctggaacctcacccttggtctctggctctgaaactctgatcaccttagggagtgtactggcaatgaccaatagaccaggaccttttgctgcaaatctactaatgttccctaaagggtgacctctggtgctcaaggttgtttcccaccacagggctgcaggctgccactctgcaaagtgaataacttccttagtcaaggctggtggatacatgaaaacctgtcattaaaagaaacacatgctggactggttctcctagaattagccatttggagtctcctcgggaatcattaaggggacattttgcctgactttgaaagcaatctttttttttttttttaacaatagaaaactacaaagtactatacaaaggggactttgggcaccatcagctcctctcaaatcccctatgatgagattattacttagaatagcctaggctattcgacagcaacatattaacgctgaaatctcagtggcttaaaaaatctaaaagttgatttcttgctaatgcatattatgatcctggacaaacaattctgcagggcagtcatcctccatgcagtgcctcaaggacccaggcacctccacacttgtggtgccaccatatcaaaaattggcttccaggtcaccacagcaagaaagcacaaaatttgggacttgtggatcacttcctaaatgctttggcacttctgcttatagcccatcggtcataactagtcatagagcccccccaagtgcaaggaggctgagaaatatatagacggcacatggtaaatatctctatcatcatttatttgtgttacacactctccaattatgctcttttagttctcttacaatgtacagtattgttgactgtagtcaccccgttaatctcccccatatgtagatgaggagcctggtgagtgtggcctattgcaaatattttttcccaccaacccaaaacgtagattcaaaaactaatgctgatttttagagaattttaggtgatacttaatttggtaaaatttattgaaactatacttctcctaatcacattatatcattttctataatcttataactctaacatcaaatttaagataagaaatatatttatgccctatatccataagcaacaagatcattaaatctctttaggcactattgtctagaaaaaagaagaaaaaacctatctaattattttcagcaggaaaaaatttacagagcttacagcccagcattttaccgcttttctttttttgcattggtgaatcattttgagcttataatttcaaagtaaatattttttaaagcctcaggacattcattgtgtaatgatcatttgaaagattttttggttatggtgttctcaaatgaataaaaaggctgttcatagcaacagttatttctatattaaaaagatgaaattgttcattaagtggtacaagtcaatttctttcatcagcctaactgcccattttagcaaagattccatctctgaattaagcaaatagctacacatttcaaagtcaatagctatactatgtttcctttaacgtgaacatctcagacatatcaatgttgtcagcctctttactaagcctttctctgaaaagactgaagaccgtgttttgttgttattgttgtcattgtgtgttttgtacttttgctttttttaaggcaatatttttgtgtgttagctacagtctggccggtcatgacatgcacactcaaaagagagccagatattttttaaaaagtatggtgaggctgagtagcccatttgacaataaatgtaaagtgctcacatttccattggtctgtttggaatttccctaagaagagttatttctttctgtaataaaaccagaagtcgaatgtaataaaccatagctggtctgtgggggtttgtggctaaagtgagtatggaaaagtctgtgaactttctgtttatttccttttcccaaccaaacccttgaaactagaggctggaaggaaggggtagagttgagggccattggactaggtggaggaagtgaccttgcagatcctttcacattctgtaatgcatgcaaaaaataatgagaatgagatagctgaagtttcaattctttagagagagattcaaattcatttgtcggttacaggaagcaaaaaaaatgccattattaatttaggcaattagagaactttgaaagtaatatttagtactttttttaaaaagcctgtcccaggagttcagcccacagcctaggaaagcttaatttttatagtatttcaaatgaagaaaggtcatttcttggatgtgcttgacagaagattgtaattataaactggtaattttaatgagaagtggggtttccataaaaacggaatgaacttttgaggaagtaaaattagagtgcatgttccatccactgtggcatttccaaacaggtcagtgttcccaacattgccacctgctctgccatactttcctgaaaaacgttaatgctttggtacctacatctgcttctcctgccttctcaatgcaccaaacaagacatcagacctttttcttgcatggaggcctgcctcctgcgatgtctgatccacacacttttctcttctctgaatgctaaacagagagaacattgcattgtgatcttcccagatttagggcagagacagggcagtcagtctgggaaggcacttagtggagtgagcccacagtgtggaggggtgagtgcctcctgaggaatcctgccctctctacagtccacgttttctggcagatccaagaggtcacttaaggagttttgaacaacctgtactgtaatgtcctgagggtgcctcagcgtcatctgtgctcatcccattgttatctaaccaaatggagtcactttgcctgtgtgcaatggaaagccaaaaaattgacacactggatttttgcagaaaaacaaaaaaaaattattgccggtcaactggcaacgagacaggaggaaaccctcaaatctgtctccctgagctgggggctgagtggggttttataagcacagggtaataaggtgtgatctgcttggatcttgcaatgaggtgatgctgggaggcataatctcactgatcctgccgcaggacaatgccagggtttgatgtgcttgaatcctggatcctgccatgtggcatccacttttaaatttggtctcactcctcagttcgagcacttggggctgcccatcgtcgcgcacttggctcatctgggcatgctccagcaatgtgaccttcgacctgcaggtccatggcaactgaacaacaactcacaaccttgttacgtggaagctgagccagaccggtctggtgcagttacacatccctacagggtctgattttactgactacgggggagcttgggtattgttttttttaagctcctcagatgattctaacactcagcaggggctgagagccacggagttactttctgagaaggagtaaatatcagcaaagaaagagagacaggaaaggcacttggcagcagcctggtgagtaaggggtcaggcagcaccaagcaaggttggaggatgagcacagtgaggacccacagggcctatcaactgtgttaagataaacaccaaatcctgcggctgggcatggtggctcacacctgtaatcccagcactttgtgaggctgaggcgggaggatcacctgagatcgggaattcgagaccagcctggccagcatggagaaaccccgtctctactaaaaatacaaaattagctgggcgtggtggcacacgcctgtaatctcagctacttcggaggctgaggtagaagaatcgcttgaaccagggaggcggaggttgcggtgagctgagattgcgccattgcactccagcctgggcaacaagagcgaaactccgtctcaaaaaaaaaaaaaaaaaaaccctagaaagccccaggaagtcaaagaagggcgtcagtgcagagcaatgcgccagctcttggttgccgtattcctggtgctacaataaaagtttgttgaccatgtgcactcaggtgggaatcagaggctcaagagaaaagctaaaaccacctggaagctaagccttgtctaaccaaatctattgagtctccctccagctaactgaggggtcagatgccactcatttctgtttgggaacagtcatttgctttaactctcagcctcttgctgcagccatgctgccttcccctcagtgtcctccttcctgccacagtaagtcactctggagtgccacgctccacttaaaaataaacaccttctgtctccatcctggcacagtttcagcttatttagcattctaacatatgtcgtctgttttcccaaacaatctaacatgagcatagcacgatggggttgataatttgggcaaatgagaaacagcctgccatcagcacagacacagtgacatttgatttgctatcggtagattccattgtgttctctcttctcatccttggatgataaacacagaaaaagactgcaagatttccagccctggctctgtggcagagaataaggtctggaggcagggaacctaaggctgcttcaggctgacttcttagaactaagttgaaaggaaaaccttaaccttccatgcctaagtaacaaaaggaccacaggctactccctttgaccttttctccagggcaaatgggaaattggctgttctgcaacaaatcagactgattaccggtcaagtcttcgtttgcaactttgcaacttctctccagcctctgaaaggttactgtccacaacccatcagactgattgcaggccgagtcttcatttgcatagaagtataactttgtagcttcatcctagcctgtgactgctcctttaggaaccaatcagatgtttgcacaggagggtgacctttgtaacttctcttcagcctctggttggctgctttctgcaaccaatcagattgattgtgggctaccacttcacttacctgagatgagcaagaagtggccaatgggaaacttctagggggtatctagacccaagaagattctgtatctgggctcttgagccactgcggctcagtccactcccacactgtggagtgtactttcattttcaataaatccctgctttcgttcttttgttgcttcattctttctttactttgctgggcattttgtccagttcttcgttcaaaacaccaagaacctggacagcttgcagttatgaccctctaccggtgacgtatcttggcaagccagccaggaggaaaggtaggcccaaagtttgggatttatttttctcctttccccttttaaatctttctctcttttccttttcaactcgggaccctctgtggacagtgcctaagcatggagacaactgcaactttctggccagcgccactctggtgaaactgaaaggtttccacatggaagcgccttactgccgccgcccagttcgggtgagggacctgagtccttttcttgttttcatttttctgagtcctgttcctttttccctttttctgagttattttcctttcctcctttttcagtctttcagcagctgtttcctagtggctccttggtaattgagaggaactggccagggccgctctccagtgatctctgaagtccagggagtgaacagggatggctgccctgcctggaagggggaaagacactttactatcctttccagttatcctttcacaactgcatgtgacgcagttggcagcggcagctcgtccagggcaaattcacacacgtttcaggtgacttaaactccttcttttcttatgctaaattcttccctaatcgtactcaactggctaaggaacaaaacggcccacccagcatccagttcttattacagatcatgattattttttataaagctcacagtatgctctggagaggaaaacctgcatgtggcgccccctcctaaggccagagacgtctggaactcttaagattggaccccgcaggaggacgttctttgggttctacggacctcaaactctccaaaggggatgcccttggcagaggttcagaggtctagtattaagtcctccttagaatttcctctcggagttgaaatgctgcttggaccgaaaagtgtctagaatctgaagtttactgtctaatggaaaagtgggatggtattgcataaatacaggtcttataggagttattaagaagttattttaggcagatagagaggaaaaggggtccttgggaagtttttcttttaaagcagctccagaaacctttcttgtctagcaggaaaggcccggctcttagatcccgccgacaagctttgatatccaaatcccggccattagaaactgggtccacccaaacatggtgattcccgctgtcttcttgccattgccccgacttgggcctggaaacatggccacccccacatatccacaggtgtgtaggacaccatggcgccctgtattcgcatattaaaaggttagggtgggagggccaggtttttgcgggccacgtgagtgatatgcctggtcaaaccaatcccctgagccctatgcaaatcaggcaccacctcctccagcctcctcatataagcagccacttttcccaccacacgggttttctctttgttcgaatcccctctccctctgtctctgtacagggaggctgttttcttccttctttcttgcctattaaacactccactccttaaaaccactccacgtgcgtccatgtcgttttatccaatttggtgcaagattaaggaccctggtgtacctccattcattggagacttatcacaggcttttgtgctgccgttctaagcaggggcctggttaacgtgtgatgccttgctttggtactgtttggccccagtgctccttggagtctggggaggtttagcctttaaaattcaaactgccaaggagactgctttatccaaaattttggttcacagccttccttggattatctattggggcaaagtaaaaccggcaagcttgtactgctatctcatggctaaggttccgagctgttggatctttgtttatgtgtgtgtatacatgtctagatgtgtttatacaacaaatgtacacttattgttgtatattgtgtctacaaaattggcttataagtgaaagagcgctcatgaaaactgagtaagtctaagcaattttcaagttcatgtgacttaaagtataactttactaaacgagctagctttaaaattattggtggaataaaaatagaaatgttttcagaattgtcaacatacattttggctgaattttatgtttttctgtgctagatattttaaaatgtcagtgttaattcaagctggaagctgcttagggcaaatctgcctcccattctattcaaagtctcactgagataaatacataactaattgcttcctttggaaaggctaataagaaactcaaaagaatgcaaccctctgtctcccacctgtgattggaaagcccccagcctcctcgcctcgagttgtcccgccttctgggaccaaatcaatgtttgttttacatatgttatttgatgttacatgtctcctttgttaaaagtcaaaattaagtacagtgagtgggataaatgttttaggtaaactttttgtgtaaattaaaatcttagagctatttttaacacccatttgatatctgggccatttccaattgagaaagtgttgtaatatgaggaaatatgtttcaaaaattatggaattcataattccatctatttttcttatctgaaaatgcccatatctgatagttcttatctataaatgcccatatctgatggttcaggatttcttgctttttggagtttcactaaagttttaggttactaaggataaaattctagttaacatgtaattctgtacacaaaatgtgccggaaagggttattttattagaaaaaaaagaataataattttgtctaatccagaagttatctaaaagttagttcaaattacagatttgaaaaagttatttatgaaacaatgtagtaaggactcattaagtaggggagaaaagtgtggaaaaagttaaataataaaatgttctttcaaacctggaaaccttggagacatttggctaattaacactttcatagttaaagcccttagtattaattaaagtaaaataagaagtattgtaaaaatgcattggcagtttgataattcttttttataatatagttaagcatgaaactaaatttagtgtggagccaaatttcacatacatgtttgcgttgtttcacactgtttactgttttgcatggatagtgctagagtacttattggtcatgtgccttaagtggatttcttgattgcacagaatgtgatattggtaaacttaaggatattgaattgtgtatggggaataaaatattcattatgtgggttttttagggcccgggataacactgcagcctccagggtaaactgagtataaaaatttacacctggtttcctgcttatttgttttggcttctagttttcatttctttgctgtttattctcctgtggctttgcttgtatccatatatataaataaatgatgttttccagttcctagtggaaggttttatttagttttgtgatcctatgcacttcttgcaagtcctcattcatttcatttatctggaattcctaagctacctttgttgggcctgcagaaattaacggagcacaccagctttttttttttgtttttttttttgagatggagtctcgctctgtcaccaggctggagtagtgcagtggtgcaatctcggctcactgcaaccttcacttgccaggttcaagcgattctcccacctcagcctcctgagtagctgggattacaggcgtgcgccaccatgcccagctaatttttgtatttttagtagagacagggtttcaccatgttggccagggtggtctcgatctcttgacctcgtgatctgcccgcctcagcttcccaaagtgctgggattacaggcgtgagccaccgcgcccggcccatgccagctttttatcctttaactaactttttgaattttagggttcctgatagtttaagtgtgttgagtatactctcacaaatagaatttgagtcatatttctctctctctaatttctccaaaatctgtaaagtatatgtaaacagtctaattcattgcaatgtattcatttgcatacagtcaagcagggttgccagggttgctcagggagagagaacccagaaacctggcacgccggcaaaagggtaagaatttcttaccagtcagtctctggcctctttctttctgtgcaaactggttaaatataaagtagaagtcactatatatctcctgtgtaaagttctaaattaattggtttaataataataaaagcttaaatcaaacattttgtcagaaaagtgaaaatataatgcgaactttcttagttcatttgacttgagtattctttgggaaataaagacagttttaaaaattattggtgaaatacaattgtcttcaaaatgtaaacgtggtctaaattacgtttgaatactaggtttgctaaacgctttaaggtcataaactgcttctttggcttttgaaaattatttaacttgcctgctttccagctagttaaggcctggggacatgtggagttggccacaccctagctatgctggaaacagtcaaaggttatcagaacataacttaagaggttttacattaaagttaaaattgcttaaagtcaccactgtaacatgcggttaagactactagaaatagttttacatgcaaggtgtgtaaaaacagtagaaagtgttttttcagtttttttttgttttttgttttgtaaaaggttacaaaagatttttacttctttaaaatttctcagtcatcattttggcaaaataaataatttatggtaatctggaattccaaaagcaaactttagttttaaaattgtctttcctaatgcccggctttttggatgaatcagagggcccctgaaaacatccagaaagaaggtatacaggattatttgacttgtttacgcacatgggattgccaaaatgatgttcaatcttctttaggttgtatttttgtgaataatactaatgtatgttccaaaaaaatatatgggatttctaaaattctaatgtctaagtatatgctatcaatgataattatggttattatgttaagttattataaatcatagaaataacttgtcagtgctacgtacctaatttggaaaataaactggtatcaaagaggatataagtctaatgttaattaaacatggactcatgaaaaccaggatgtccaccttgtccttcgtgaatccttaaagcttttgtttctaaaagttatgcattccatgactcatcacggaaaagataaaataatccaaattaaatacattggtgcaatgacttacaaattgtttaaaataatttataaccagtgcttaatcccatattactgggaaaacaattaaagcttcaggtacatttggtcacctgatgggccatttagacattttataaaggggtttcattcaattgttattttcagtgcatgttttctagttgtataaaagctttcccatgcaagaggggtgatgttgtaacagtagattattatgctacagtgtatttttaccgggtaaaaaagctttttatggcttacatcttctagaaacagcaaagaaggactgttcttgccatccacactacaacaaaacttcaggaccttggactttgagttcatagtctcacaattgagaagggtccctccacacttttggagctgtgcacccattggaaccctagaggtaaacctaaccagggaaatttctcccaagaagaagatggcatctttgatgtgaacagctttttcaaattcacagattaagacttctactatcatgaaattcttatctttgaatttttttttcttatggggtgtacttttatttgtgaaggattttgcagccagccttatacatgggtaaccttgtactttaatagataaaatatgaaggcccaatgtaggtaagaaactttaatcatacatgcactgcctcataatcagtcaaaaacaaaacattggtttactcctcttaacccacatcatgggttaaagagaacattgccagaaggccttcacttttctaaaagggcatcctttgttaggtcttttttccatggtttaaagtaaagaagcaaagataagaaatgtaaccctcatgataggttctatagcaaattctactgtaaaggctacagttacacaacagactttaaattctcttgtgaacgttatgctaaataatataattggctaaacaaaaagtacctatgcagctgctggcacttatggcctatggagaaatacatcaaatgaagattatagaaattcagtggtagagaattaatgaagagatcacttagttaggtaagtaaattctttatccagctcattctttgatctatttgatgttaggaggtttggtttatgggaaccttgggtaaggagcatactccaaactcttggtactatcctcccaatagtcataataatagtctccctggtgcattgtattctctcaaaggtttttaatgcttgcatttggccatctccagaatgtcatacagtctctcttcaactggaataacaggaactgaaagaaatgtgcaaccatgaggacaccataacctataaatgatgtgctgagattggaaactcaaaatcatggtaactgagagtgatgctaaggccctaaattttggtcatgctctcacctaagtgaaaaatggggaaatttttaaacaaaattctgggaggccattgttttggactaagctcatgcactaggccacaacaaaccaaactgaacaaaaatggagtcactcatgctgactttaaggaaacacatagattctaaaacagaccaggttttgttttttctcctgcaaatctctatgacaaacatttctgacaaaataggtatcaacctcctgaagttcccattaaatcttttttttttttttttgagatggagtctcactctgttgcccaggctggagtgcaatggtgcaatctccacctcctgggttcaagtgattctcctgcctcagcctcctgagtagctggaattataggtgcccaccaccatgcccagctaatttttgtaattttagtagagatagggtttcaccatgttagtcaggctggtctcaaactcctgacctcaagtgatccacttgcctcagcctcccaaagtgctgggattacaggcatgagccactgcgcccggctgcccattaaatcttttaaccgaatccatttcctctagcatagagaccattgagcttcagatgactgtgcaacaaggtttcagccagttccaggtgaaggcaccacccctggccatcaggaagccaccctgcctccactagacagagtaaggtgagagttccatgatctccaacaggtagggactatgccccaagtcagcatgaagcagttagagaagaaagaccttcagtgcctctgcctcccatgaagacctatggggatcatttctctcagcggggagatgaggcaggagaatagggtctggaggcagggaacctaaggttgtttcacacctgacttcctagaactaatttgaaaggaaaaccctaactttccatgcctaagtaacaaaagtaccagaggctactccctttgacgttttctgcaggacagatgggaaactggctgttctaacaacaaatcagactgattgcgggttaaatattcatttgcaactttgtaacttcactccacaaccaatcagactgactgcaggccgagtcttcgtttgcatggaagtagaactttgtaatttcatcctagcctctgattggttgctttgtgcaaccaatcagatgtttgcacaggagtgtgacctttgtaacttcacttcagcctgtggttcatgctgtccgcatccaatctgagacatgaggtgaacataaagtggccaataggaaacttctagggggtatttggacccaagaagattctgtatccgagcccttgagcccctgcttgggtctgctcccacacagcggagtgtacttttgttttcaataaatccctgcttttgtccttttgttgcttcattctttctttgctttgctgggcgttttaattctttgttcaaaacaccaaggacctagacaacttgcagtcaccaccctctcctggtgacagctcttccagtcaaaatgattgaaacatcatttgcctttaaatatcctattcatttggcaagcatagagtggacgccaaccatgtaagagacacgttggctctggcgtgaaaatgtagaaacggtctctgctagcaaggggcagataggttcatgagcgagaccggattacagagcatagcgagtcagatcacagctggcaggaggaacaagaaggaaactcacaagacaatgcatggccaatcctacactcaaagatgaggcaaagcttcactggtatctcagtccgtgcgtgctgctataaaggaatacctgagactgggtaatttataaagaaaagaggttgatttagctcacagttttgcaggctgtacagaaagcatggcgccaggatctgcttctggggaggactcaggctgcatccactcacagcctgaggggaagaggagctggtgtacgcagaaatcacatggtgagaaaggaagcaagagagaagagggaggcatcaggcttttttttttaatcctctacatttattaattaaaaataatttcaacttttattttagacttagggggtacaagtgtatgttttttaatatggatatttgcatgatgctgaggtttggggtatggatgacagatcactgaagcagactttttaacaacagttctagggggagctaatactgtgagaagtcactcattattgcaggacatcaccaaaccactcatgaggtatccaccccatgactcaaacaccttccattaggtcccacctctaacactgaggatcgaatttcaacatgaggtttgcagggtcaaatattcaaactccagcaaccagaacgaactggaagaagttaccgctgctctcagtcaagcccagaattcctgtcccatgcagactaagcattttcacacagatctttctaagtccttaggtcattagaggagtaacattccctctggctgaaagggagacatcaccaggaggtccctcagccttttgcacaactgattgtccaggagctctgtcctgttctgataggggctgagctgaaccctaaggctcaggattccggggaatagcaccacccagccggacctccccagggaccccagaatctacagtgactcagacccctgtacaacctggagcttgcacatctatttttttcctctcacttatctgttcactgggtcaatcagtccttcaacaaacatttactcagccatcactgctcaccaggcacagaataaaagcaacacacaggaccagagtatgggccttagagacctgcccgtctacagtgcaagtttctaccagggacatgggaacccaggtattgaaaagggccttgtggatgctttatagagatgagagatggaacaactttgcatttccagagggccctgggctgaggccacatctgcagaccttccttgaagtgagcaagcaaagttgcttgccttggcttcatgcctgacgatggcccctctgtggaaggctgcatgcttggactcaaccctgagtcttgggaaccactagaggaagagtaacaggaggtggaacccagggatggccacatgcaacctgtttgtcccacctcatgcctcttcccagctatgggtccattcagtcattcacttattcccataaaaccatacactacatttcttcaaatttcttatgggcctgaagcccccttaatgctcaccaaacatttaatgatttttttttactctctcagaaattaaatatgaacataacgatcgtcactgttaactattgtcctcaagaaagttccacatttctcagatagataaattttacattattaccacaaatgggccatacaatgcttgcaaagtgccaagagaagtctctggtctacaatggtgccagctctctctgcatgttggcactgaggaatgaagaaggagctggaaaatatgcaggagcagacccagacagaagtcaacaggccaggctgattggaggggaatgttggcggtctgaaaaaaaccaattcttcaccccctacttttcttcttcctttctcaatatttagtctccttaaggagcagtaggaggcctaggtgaataaaaccagacatagtgaatgcagtagaaggagacagtctttagtcccaaactagaaagagctgatagacaaggtagcgatctccctttccctggaggaaagcaagcagataacagacaataaacagttgataaagctatagaacaaatttaagcaagagaaggactttaagggagagaaaaaaaaataacattgccaaggcatcaactatcaggaactcagcttggcctttgtatattaccttatttaatacccacaacaatgctaaggaatgtattaccatctgcattcgcctaagaaggagatatagctcagaataagtaacatattccaaagtcacaaactggatgtggttctgactccaaagcccattctcttttcattatggtcactggctccctggaggggcaggaacagtgcacaggagtcatttgtgcattcagcagatgtttgctgagagtgaagctactatgctggtgtgaagatacaaaaatgattaaacccctggattatcacatggaattccaaaattttggaaggcagccttgatgcctagggaactaattgcatagattggaatccataggccggcacccctccttctgttcctgcccatctgccccaagcctgggtggcctacatcagtacaggggcgtccaaagagcaggtgctggctctcctgtgcaattcacctctcccagaagcagtatttcccaaagtgcatttctcagaagagtggggctgtgtgttttagactaagagcgttctctggccccaggtgtttgggaggcctgcaggatgcactcattattagaggatcacagtgcgtgctaaagcaggagagggtctgcccccacccacgctggagctggctcactcattcacgtctcagagggctctgctgctctctacagaacaaaggctttcagcccagcaggtggctcatgcctgtgatcctagcactttgggaggcccaggtgggaggattgcttgaggccaggagtttaagaccagcctgagtaacatagtaagaccccatctctacaaaaattttttgttaaaattagcaaggcatggttgcacacgcctttagtcccagctacccatgagggctgaggtggggggatcacttgagcccagaaggttgaggatgcagttgtctgtgattgaaccactgcactcctgcctggatgacccttgccccagcctggagcaagaccctttctctaaaaagaaaagcaaaagaacaaaggctttcagaatcttttggactgtggcccagagtaaggtatagattttacactgcaactctatacagataccacacacacacatacatacagatgaagccaaagttcagtgaaacaatacttgcctttactatgtgggttgcattctaaccgtttctatttggttttcttgtaatactgagtcatgaccctctaaatcaatttcatggctccacagtttggaaaacactcatctagaatacaagaagtcacttgagctgattgctaaactagccccactctgaatgagagggtcgaaaaactgacatgaaactgtgaaccaggagcctcaaatcccagcgtcactgcttttgggttgtgtgatctgagtcagtggcttctctttcctgagtgaatgtgaaaacctaatggtatcatttagcatggatgcatgctagaaatacactggaaatagacgtcactcaagtggcgttctcaaggaaaatttaacaaagggactgtctgaatcatgtgtgcagggttaaagcaaggaaaaggagagggagcgtttactagaacctggagtgagagctgtgagagaaggtgccccataggacacaggcagagaagaagcttggtggtaaataccctgaccccttttccttcctccctgcaatctcctattaatatttccattaaccaacaccaaccagaagccagagggcagaggggtccattgttgaaatccttacaggtcagcttcctggcaccccagcagaatgaagagtggaaagtggatcaggagggctgaatggagaagagtcctcaccccagtgatgacagcatagtgagggacagtgtttactgtgctgcctcccaacagccaagtgccattcagaaaagtggtgccctcactcctacagcccttacagtttggaagtgtttcccatccattttcttttttaaatttttctcttctttctttctttctctccttccttccttccttctttctgtctttctctctctctttcttctttctctcttttttttttttttttgactgggtctcactttgttgctgaggccagagtacagtggtgcaatcttggccgactgcaacatctgccttccgggttcaagctattctcatgcctcagtctccaaaatagctgggtttacaggtgtgcaccaccacacctggctacaatgatgccattgcactccagtctgcgtgacagagcagccttgtctcaacaaataaataaataaataaataggaagagcctcagggttggcactacaaggtgtagacatggatcaggctgagggtggagagtcctaagggaaggcatgggcccctgacatctggaaactggtctgacactgacagcgagaccatgttctttatgctagacatacctgatctcacagaacacctacatcaagtgaggtcactagacaaaaacaaaatcactgtgcagccctcctaaaaaccaccactcttggtaaaaaatgagtgactgctacttctttaccaattacagccttgtcctcgctctagtctgcccttcctgtctgtaacatttatcaagataccaaactacaacatccttctcgctttctgtcagtacccaatccatggcaaacgtcaccttcttacaccctcctcaacattacccaaccaaagcccagactctaaagctttcatcaatatcttcttcctgagatgccccactacttttctgtggagagcatccttcttcaccatatcaagtaataaacccagctggccaactgcaggtgtgttcctggtggtctgtgactggaagacagtgacattcagaaataagggagttcagaacatgttgcccccagatctgctgctgtagaatattgactattttgagttaaaaacggataagaaaacagcagatgaaagaagaccactctgatctgtttcttaaaagcaaaaaataattcccatgtgaagaaggcactctgtaccagaagcaaagtcccactcccatcaaggatggggaattgagaccaagaaaaatctgcacatacaaaccttgttagactcacccttatcttcctggccacttctccacccaactaaccatgttagcccaagcccctttgccttgtcacattttcataatgcactaccctttgtccaattcactatgtgtttactgtaactgcctttttgggtcttcatttccttaataaggcccccgtgtcacataaaacttgtgtgaaataaatgtgtatgttttcctttcgttcatctgtcttatgtcaatgtaactcgcaggtgcagccaaaaatccctatgagggtagaggtgaagttgtgcctcccctccaacagcaaggatccagggcaggcccatggagggttgggatctggggacgagcagaggcaatagccctgctcttctgggtagtgggggatcccaggaaagccaccgaaggcaaaggtcccaggcctgctctggacaggaaaacagagggcttgcccaaacaccataacaaatagaacaaagaccttgcagagtccagaatttacttcagaaaagtttattttaagcaaaaagaacatgataaaactacagttaaaagaaaaaatccagctgggcatggtggctcacgcctataatcacggcactttaggaggctaagggaggatgactgtttgaggctaggagttcaagaccagactgggcaacatagtaagaccccatctctaaaaaaaatttttttttaattagccagattgctgatctgtagtctcagctacttgggaggctgaagttggaggactgtttgagcctaggaggttgagacttcagtgagccgagattgcaccactgcactccagcctgggtgacagagcaagactgtctaaaaacaacaacaacaacaacaaaaaaaaaaccataaaagaaagaaaaagagagagaaaggaagcaaggaaggaaggaagatgtaaaagaaagaaaaagaaagaaagaaaagaaaaggaaagaaaagaaagaaggaaagagaaagaaagaaagaaagagaaatcgatcgaaagaaagaaacaaaaaagaaagaaagaaatccatctagtagctctgtgttgggggattaaagagacaaatactggtggctgggagcccagtgaggaagctgtggggaggaagtaagtacattgggatgctcagagactaccccaagaccctgcttggaacttggagtctttctctccttcattctctgcaaactcaacgtattcctttgaagcagaagtgaaagaacctaagcagctccagttctcagaattgcttgctgctcccagaatgcagctgcctgtctccttgctcctggccaaaaaacaccgagaggaaggcactggagagcagataattcagctcctcagagaaacactacacacagatgtcagaagagaaaattaacccagagtttgtggactagattctccttcagtcatacaagatgcatgtctaattaatggaaatgactttggagcaatgcctttggtttcatgaggggaaaatatttgagatgaaggatttgtccaaatgtattttcttgatgccgcctccaaagaaccttgaaaaggaaggaaaacaaaatgcaagctaagtgtcagtggtaactgatttgtagcttgcaatgttttattaacaatatctggttcatctgctgttggggagagaaacttttaattctaactggtacctaaccagtcctaagcaggctctctgaataccttacttagcacctatgaaaaatgtctgaagcttgaagtacaaaagactaaatagtaatttggaagtttgctgtgctttagagtgaagccctttcctgtcctgcacagacaaagatgtctgctgggtttcatgaatgttgcatggcacgtgtaattacgctagataatcacacctcacccaagccccacacctgatgatgaacaggctgtggaaggctctgtctccatcctcatgaggaattattcagcacctagactgtattccacttctgtttgggcccataaacatacatattgatcaaaagcttttgcaattctgacaccatctactctaaaacactatcttatttgtgggtaatcagcacctcatgaatattagatttctcccttaatttcgctagcgtggctttctttttggcagggaaaggtcaggactcaatcaggtgaatgttgctaagaaaaaaaaaagcagaacaaattcctgctctgggcaggaggatgctgtgggtcagggatgaacgggcctcctccctgtttttcttccgccctctcctcggttcccagcactcccctgcccccaccaccctgacccagccttcctgtctcatggtccagagatggctgcgtggttaaatggctcatcactgaatagaggtaaagaagtatcaaaggcatgagtacctgtatgtcagaagaactcagaaacagatgatgggcgagttgccgggagatagctgagccttgtactgagatcgtgaatggagatacatcttcctgctcccatctacagctcggaagacccaaccttacatcccagtccagtcctggctcctcaagactccagacccacggagaggtggcgctgatggtgagacagccaggaggatggtttctacagtaataacccacagagtgctcagaactcattccccaaatcagccactttcaaatcagaaactagaaagagggagatggaataaaaaataaaggaaggttgagataatcacacagctggaccctgggaggcagtccatgggctgggcagtatctcagtaaggtttaggatccagggtcacatctgtgaggcctccaccccagccccccaaccttctatccagccagccagcctttaattcatttggctatcactaagtgagcacctacaatgtgccagacatggggctaagcactaaaagtgcaaagacaagctggacagtgtctaaaccttttaaatccattcattcatcacttcttcaggcgtgtactgtctctactaggtaacagatattgctagctgaatttaaggcaaagggccaaacagatgtggtcaccatcctttcataaagcacagtcttcacgggtggacatatgtttattttgtgtttatttgtttgaagatcaattataaattgaataagtactagagaagcaatacactgagttttgtagcaagaaaaacaggaaacaccaaatctagcctggtacctttgtggagcctgctctgaggaggtgagctgaggtgaggagtgagggaccaggtccaggggctgaaagaacattctaggcagcaggggcaaccaggggagaagaccctgacttaggaagcactgaacgcattcaaagtggcactgccatccctacactttgggaggccaaggcgggtggatcacctgaggtcaggagtttgagaccagcctggccaacatggtgaaaccctgtctctactaaaaatacaaaaatgtgctgggcgtagtggtgcgtgcccgtaatccagctactcaggaggctgaggcacaagaaacgcttgaacccgggaggcggaggttgcagtgagctgagatcacgccactgcactccagcctgggcaacaagagtgaaactctttctgcaaaaacaaaacaaaacaggacaaaaagaaacacacaaagtgacactgccagaaggccaggggactgggcagagtaacaagggaaagagagatgaaagatggggtgggaaggcatagggaatgagtaggggctttccttggggtccaaagaccccaccaaggggtccacaaatagaattcggtgagtctgtgaaggtggataaaaagtgattctttctgttttttttttgttttgttttgtttttttgttttgagacagagtctctctctgttgcccaggctggagtgcagtggcgtgatctcggctcactacaagctccgcctcccggattcatgccattctcctgcctcagcctcctgagtagctgggactacaggcatctgcctccacgcctggctaatttttttgtatttttagtagagacggggtttcaccatgtgagccaggatggtctcaatctcctgaccttgtgatctgcccgcctcggccttccaaagtgctgggattactgtgcctggccaaaagttattcttttgtgttcaccaacctcgagctgaaattgagcatgtccctaatagtattattagtacctgggaccttgtcatcaatataagccatagaggcctccatttcacagcacggtttttgcagatatcatgctgtgtcatttatactgatcacaacgttggaattatgatgcttatcagacctgctgctataatgtattactagaaaagcaaatctgttattatattacattttaatgttaataagtatatttcaatataattgattttgttaattctgtgtattttactacatgcatttaaaaaattgttcagaaacggggtccactggctttgcccaaaggcatctatggtacaacagaactaaggacccccagctaaagctccctggaggagcttgcagtctggaggagaaggcaatctggggccagaatgagctgaactatgaatggggcagtgccaggggctctggaagaccaaggaggcaatccttgcgccacctgggatgggtgtcagtcatgtccacaacgatggttagaggcatcttctcagagtgcatcccaccctgccaccagccaaaggcaggcacagcacagggaaggccaccaagtcaggccctgcccagctgctgtgacctggtctgcttcaccccaggaggggtgagagcagccttccccaaccctctgcatcccatcaccatggagaccagggcgcagtctagccagagggaagacagtactctgtccttgttatttacttactcatattctccctccttctcttgttcatttactctctctctcctctctcattcccactttctctcctctttgatttttttctctgcctcttttccccctctctcttcccctcgccaacttcctctcatctctattcacttctgtgtttttcctctgcatttattccacaatccttcacttctaacctgccacagagccccgaagcatgaggaactgggtgggaacccacaaatctgatagtcaaggcttctctctgccctatttttaaggtgggaaaacaggcccggagagtggagaaccacaccctgtctctagatgtgcctagcacatcctagtcctagccctgtgctttggcccctgtgcctggagagggtctcagcatggcacgggcctcaaaggcagagctggaagggccttggcttgcctcctcctggcagccctcagcagtgtctatggggtgggggggtaagcaccctcttcctcatgcagaatccctgccttgcccacagtagagctggttcccaagcagaagagcagcaaactgaatccaaaggcagggacctttggaaggcattctctcctcagtggaaatgagcctctctctctgctccacctgcctccccagcacctgccctgggaaatagaaccccatcatcaggggaatgacaaagaaggaatgacggggtcccttgccaacctgctgagcttggcaaggacctcacagcctcttcttccagaaaagacaatgacagcagggagggggaatgaggtgacactaattcctgtggagcctgcctgggatggggagggccagggctggggggtgacttcccagggtgaagctggtgcccccagcccgaccctccctccctcctctgtgcttctgaagcgttttgcgcactggctcgtcagcactgcagcactatctggtagctgccaatttactttattatgacttgttggagcacgaggcctgggaaagcccaggcacttggtaaatttcagttgaggaaagtgaaactcagtgagctttaacacaaatataaatgactgttgaaacatttctaaagttacagagtgaagggagaaagtggcataattcatatcacacaccaaagcatatgtctaaactgctttctttccctcccaagtcaggagaggagcaacgaaacgggcaaatggaatgtcaaagtgtctccccattcgtggctgccggaaggtggctgagcatgatgggccaatcttcatgagatcacataagtgagtctctggccaggccagagggaagtaacagccaagagccctgatgaattaaaaaaatatatatatatatatataaatatataaatataaatatatataaatataaatatatatatatatatatatatgaagatttgaatgggggcccaaagagaaggggccctaacatgggagagtggaggaacagtgggagggttgaggggccaccaagcaggagcactggggctgcacaaagacctcttccagcactcctcatgatgggatccccctgtctctccaaagccctcagagaaagcgtattttggggtgagccactgtccatgggaagcaggcgaaagcccacagagcacgtgtctgagctgtggctggagtcagaggtggggctgagaggatgcagggcaggcacaggaggtgctggacaagaatgtgtaagttatgagtcaaaatgactggaacactctcctggctcactgcaccacctcctccactgctcatgggttgaatgagatgggatcccccaggagaggccagagcccctggggcccaggtgcagctgaggggaagggggcatccagcaggcttccctgaccagctgtccatctaggcccctggccctgctggcagagctggctgcagcctgatgccagactgggtgaggacattatgctaagtgaggtaagtcaggcacaggaaatactgcatgatctcattgagatgtggagtcgactgaggtgtggagtctgaaaaagaagaagaagaagaggaggaggaggaagaagaggaggaagaaaaaaagaagaggaagaagtagtagaagaagaagaacaagaaggagaaggagagaagaaggaagaaggaagaaacaagaatgaaggaagaaggaagaaacagaatagaagaaaagtggctcccaggggtagggaaggcaaggaaatggtggggagatgtaggttaaagagtgcaaacttgcagttatgtaggatgaataagtctggggatctaatgtacagcaagaggactacacttactaatattgtagagtatattgaaaatttactgaaagagttgattttaggtgctgttagtgtgtacacactcaaggaaactatagaaggagatggatatgttaaattggtcatctgtaaataatcacttcactataaatatgtatatcaaaacatcttgttgtgcatcttaaatttacacaattgaaaaaaaaaaaaggctgccagaccaagactcagggccactgcattccaccagggggtgctgtttgacatctgccaacacctttcacagcctcctccgccaaatatttcagaaaccaatttccaataaagcaaacaccctactcacctggctgcagagttggaaaatatcttgtttcgttgcaaatgagttttaccatctcctcagagctctgaacttagccatcatgcacagtctcttagttgggtcagtgtcccgggatggaatttcctgaccttgtcaccggttcttggatccacaccttagagcaattcattactgttggaactgcctgcatctggttctggcctctcctctcaattaagggagaaacaagacaggagggagggctgcaggaagctgctgtgctgtgagaagcaggtgcccttggatggcttctgcaaactccccaggtcccagttttctcattggtgaagaaaccagaatgggcagaccaatagccttacaggcttgctcagtggctatcctgacaaaacaaaagaccaaaacacaggttaggaggtgttacctaaaatgtacaggaggccattgatttgggcggagttcctggctgtgcatctggcctgcggtcacccagtactccgggctctgacacacaggcggcagctcctccctatgaaagtgccacccaggttggacatgtttttaaaagctgatcgttaatgagctggaaaggaaaggaatagaagccattatgatcactctaagaaagcatctctgattcatggatcatttactattgattattgaaaccaatgccatcgtgcacgccctgtggctggttttaaaacctctatatcgtggagtttgggatttatttggaagcactataataagcagcacatgacaattacttccctcagtattccctgtaatcaagataaattatcctgctattgatgtaaatgggatatgaaaatctatagagtcctcctgaggagaataaaccctacattatgctcacctcatttaacagcaaaaccattttggggtcaatcaaaaatacattcccccaaacttttattgccatccatccttagtcacctccagaaacaattagcaaacaataccagtgaggaagcactcagcctaggggcgcctgtactgctgttattatattcgccttatagagcctccatgtccacagacctagggcatcctttgacactcacaggtgtcttatcataaatgtatttacataggacacatatgtatttaaaatttgttttccccattgctaaacaacctcttatgaaaattcaaagtacgattaattatatatgaatttttttataaacaacaaatggccaggcacagtggctcacacctctaatcccagcactttgagaggctgaggcaggtggatcacctgaggtcaggagtttgagaccagcctggccaacatggtgaaacctcgtctctactaaaaatacaaagattaaccaggcatgatggctcatgcctgtagtcccagctacttgggaggctgaggcaggaagaatcgcttgaacctgggaggtggaggatgcagtgagatgaggttgtgctattgcactccagcctgggtgacagagagagactccatctcaaaaaaataaaaataaaaatatataaactcaatttgcattacttctccttctctgatttttgtctcttcttttccatcaagtgcttgccttttgagccagctttctgtggctgcttttcttctgccagaaaaggtgctgccctgagcagctctgtactctctctttctttgattttctctgtttttcctgtccctgaaaccccatactttattcattcagtggggatgccacagccttctttcctaggaattcctttcagtgcagaacgcttctggcagtctcaacttcttttacgcacctaacctctctttctgaatttgttatttaatatattgtccttttattcagcatctttactataaaaccttcttctttatagcaagacaagcataaaatcctctctaagccatgtcttttcaagctattttatctcagtcttaattctcctaatctcacctgtttaaatgaggagagagaaaaaggaagaggaggaggaggaagatgaagagaaggaggggagaaggaggggagaaggaggagaaagactcacagtgacaatgatttgactatcactggatgttaggattatgagtgatttattttacggtctttattttttcagcattttgcagactgtctgcaatgaacatgtacactttattccagttgccctaaaaagctgagcctacgacaaaagcttacaggctaaagctttgttggaggtgcaatcccaaagaaagaagcaggaatgaggaagaaagaggggcagagaaaaagcaaaaacaaatactgagcagtgcaattccaagccggtcacagtctcacaacaaaacatagctgactgctcagtcacttaggacctcaccagagaggccacaaggagctgtgagccacagtcagccaaggagggtcaggaggcactggctgtctcagcctctcctgggcaaagtctgcactgactccccacactggcagaccacgtggctccacaggaaaagccgggctgcaggggacctgacccagccatgcccaggtgcaccgttcctcctgtcacttagcaccacacgtgggggctcttggtctgcagagctggtggcagcagcggaggcagtcagggctcctggaacacagacagctgagctattgctagagctgctctggctggaggcaaggcaagtctgctgatcaaatgcttttatagctaagaaaataagaatagcttgttttaaaatattagattccattataaagtcttgatccttttagcctcagcttgctgtaggctcattcaaacctttttatatcccagatctacactggacacagtcctttaagacagagtcataaaccacaaagcccacggggccaggccaggaacacgcacaggaaagtgagctgagtggaggctgcggaagtgccggctgggtggaggcggagcgcacacacctctaagtcacgactgcctggcttcggcccacggctgttacaccttttgactttgttccaaaatattttaaaattgaaattcacgacttctctaaacgtgagaaatctcatttttcactgttgacaagtggactttttttccccaatattttgagctaaacaaaacatgtcagctctccacagacagtttttatttgtccacaagcttgtgacgtctgctaataaaaagactatggaaaacacttcattttcccaacctctgcattgcctcacatgatagctcatgttttcatgaaggttccatgtgtaagacactgagtgttacacatggagttcctcatgtcgttttggagcagcactgttacataggtaatattattagtcccattttatagatgagaaaactgagcctctggaagcttaagcatcttgctcaagatcattcggatggtgcatcgctggtgtggactttgcacaccttcaggggccaggcctccgttgacttttccactgaagatgtgcccacacgtgttaacctctctgaaactcacaaccctgtctaattgcaggctgcttggctatcactattccgccgataaggaacttgagactcagggatgtaaagtgaccctccagaggttccaagcgtaagaggggaggcagaattcaaaggcaggcatgtgtgactccaggcccaggaagccccagcctggggatccccagcctgctgaattcacagagcttcagagcggtcctgggtgctggaggcagaacagatggagatgggcccagtactcatgctggagaaagtcctctggacacaacttgccagtctcatgcaggtttccctggggcactcactaaaaacaagattggttcttctgacataccctgaaggtagccactgccaggcagccttccccaacttatttccccagtggcttcatttcccagcttccacacccaccactaacagccttcccctctgagaactagactcactgaaagcgcggactgcgttttaagtggctgtgactccccagggctcattttacctaacaaaggaagagataatctgtgacactgtgatataataagaaatagacatatatacatatattttttaaccccatgcctcttgcttctggcacagagctcttaagacctttgtaatttcctgagccattgactatctaacacagagctcctaaatcccttggaatttcctaggtaacaggagtctctttggttcttatgaagtgactcttggtgggctcctgggtggcctcaggatgggggctggttggcaggggaaccaaccatgtgattagggggttggaagtttcagccccactccttgatttctgggaagaggataggaggtgaaggttgagttgatcaccagtggccagttgatttagtcaatcaggcttttgggctggatgtagtggcacacacttgtaattctagcactttgggaagctgagtggggagggcaggatcccttgagctcaggggtccaagaccagcctggacaacatagtgagacccatgtctctacaaaaaaaatttttaaatagccagatatggtgatgtggtggttctagctactgggaaggccgagcagagggatcaactgcttgagcccagaaggttgaggctgcagtgagccatgactgcaccactgtactccagcctggggcacagagtgagacactgtctcaaaaaaacccccaaattatgcttttgtaatgaagccctccaaaaaatccaaaaagacagtttggaaagcttctggttgctgtatgtgtggaaggtccttgaagggggcactgaagccccctgccctccacacatccttggctgtatgcgacccaccacctggttgttcatctgcattcttcaccatatccattattaatataataaactggtaaatgtaagtgtttccttgagttttgggagccatgctagcaaactgtggaaccccagttaaagccagttgatctaaagtgtaggtgataacctactacctgcaattctcgtccaaagtggggcagtcatgtggcactgagccctcatcctgtgggatctgccctaacttcaagtagatagtggcagaattgacttgtaggacatgcggttgggatccactgaaaaaaagtgtgggaaaagcccacatatttgctgtgaagtttggctgagtggttgtgggaataaagaaaacacaattttattgtcatcatcaaactcatcaattagtaacatttcttagcttttaaaaccctttgaaaggctgataaaagctgttggttctcccctcaaaataagcacttattaaacccagtgctccatctgatttcggagacgtcctgtgccgcctgaagcccatccctgcactgaggttgagaactcctgatgcagtcgtggtccttcttcatcgataagtcacttccggcccacaggcttgtcctcagatcactcatgagtttctggcaggccaaggattcctgcttcctaaagtttatttagagttcatggtagacacagactaaaaacctactcaaactggcctcagaaaaggggaagggagacatagtttcagtgtggaatgatggaaaagctctggaagtggacggtggtgacagctgcatgacaacgtgaatgcacttaaagctactggattgtatgcattaaaatagtaaaagtggtaaattttgtgttgcatatatattaccacaataaaaaaaattcaaaaaggtaaaataaaaggaagagtacattttaggggctggagagtacaccagggaagctgctggctgctggacctcaggaggtaacgagaacattgtcacactaacccctgcccctcccctgtggcttctccctgtccactcttccagcttaggcccacatcacagctctcatgcttttattcccctccagcaagagaaatatttcctcaggctgggaggccacagctcataccaagacacaaactcattggaggaggaatctgattgctccaaattggagctaacaatcctgtcttggcagcaggcaagaatctgttaatataatcatggccaccagagaagtgccatcacagggggaggcagaagaaagcagtgtggatgcacatcacagaaacgaagccatgagacgcaccagaaggctacacgcagagcagcacagatagagctgaaccgtctattaccgagtagaaagaggaagaaacagaagatctaggtgggagcttctccagcttgaatcacagaggaaatcactaagggaccctcttaaaatgcagggactgcttccacagatcagaagcagggcctaggactctgcatttctaacaagctccaggcgaggctgctggggcacacaccacactttgagtagccaggctttagagcccaagctcagcttttgtgtaaatcaaaaatgcatgccggaagcagctctacctagtttacaaggatgcatgcattctccagcacattaccaaacacaagatgagaagcagggaagaggtgagggtgtggaagtgcaatgagaatacgggaaagagaaatctacaaaatgggagagggatcttgccccatcggccagtgagagcacgctgagagctgagggtgtgattaacgtgactcgtacccacagtccacagaaggagaaggaagggctctcatgcgatggagcaacttcctggaccctgctggcttggcaggtttcctgggccagccccaccggcttccttaagggacatttgaaatggtgacttagctttcacctataagcagatggcttggtgagggtggtgagatttaaaatccactgcccctgaacttcccacacacttcccacacacaactgcattcaatgtgtctttccaggatatagaaaaaatatttgcttagatttatgttaaccatttgatttgcatgcacaacgcaaaaaaaaaaaatcaacatcagtaatcaaggaggctaatatgcaaatgtatcaaatcatcatccccagaattttctaataaacaaaaggctgaggagcaacagccagtgacgctggcagagctgcaggcgggccacagcgaggggagagggagagccccacagcacagctcacgtggcacagagcacatcactaaatggaaatggtgtgatccatttcacctgcccccaaaacacatgctgctatggctcagctgtgtccacacccaaatctcaccttgagttctcataatccccacatgtcaagggtggggccaggtggagataattgaatcctgagggcagtttcccccatgctgttctcaggatggtgagtgagttttcacgcgatcttatggctttttttttttttataaggggctcttctccctttgcttggcacttcttcctgccaccttgtgaagaaggtgcctgcttctccttcaccttctaccatgattgtaagtttcctgaggcctccccagccatggtgaactgtaagtcaattaaacctctttcccttataaattacccagtctcaggcagttcttttctttatagcagtatgtaaatagactaatacacatgctatccaatagattaaagagactgaaacacaagtgtgtccccaagacaggaagagctgggaaaataaaatacctgacatgtggcatggtgccaagcggaggtcccatggtctgctttccctcaaaaactttattccatctctgtttctccactttcaccctattacctggagagtggaaaaaatgctccttcaaacaaatcactcaaaccaaggaacaagttttagctcatggagtctcactgatattgaaatatgggcctatagtttgaattgcttacaacacactgattaactcaggactaaaatgattcatcatactgttggtgaacttagcagcttagcttctgtgtgtagtaactagattggcacttactgagcacctgctgtatgctgggcagtgtactaggcactgcaactgaggaaaaaaagtattttttttttgagacagagtctcactctgtcacccaggctggagtgcagtggcgtgatctcagctcactggaaactctgcctccggttcatagctgggactacaggtgtgtgccaccacgcctggataattttttgtatttttagtagagatggagttacaccgtgttagccaggatggtctcaatctcctgaccttgtgattcacctgcctcggcctcccaaagtgctgggattacaggcgtgagccaccgcacccagccggaaaaaaaagttttaaagcctggacaacatggcaaaacctcatctctacaaaatatacaaaaatcagccagatggggtggtgcacgtgcctctggtcccagctactcaggagactgaggtaggaggatcgtttgagcatgggaggtcgaggctgcagtgagcgatgatcacgccactgcactccagcctgcatgacagaccttgtctcacaaaaactaaacaaaaacataaacaacacggtcttagatgtgggcattgtctatcatgtgccacccacctatctatctagagagacaagactaacatatacagaatagattagagcaacaaattgtgttcctatacgtccagtggatggacttcatgcttcaggcatggctggatccagggatgcaaacaatgtcaccaagacactgccgcccaccccctgctccctcagagaagcttcctaggcttgaagctgtcatagaaggaagcagccaggaaggagaagcaaaaagaagcgctggcaggccccggctggaagatagtgagatgggggagaaaacacagagcccttctttctcttgtgtctccatcagtccctacatcaattctgcttggctctctgggtcacctgctcctcctgcacacactaagcactgggcaagactatggcactctggttggtctttctgaatcctggacccttcccagaaggggaagggagctgcctaatggtcaggttcaacaaagtcacatggaggggcagagcacaaaggtcactagagaagaatctgctgggcagacaagcaacacaatatgattgagaatgcaacaatatcacactggagacatcaccatgggttgaaataaattaggcgagagtggagcgtttctaaaaatgcttgctgtagactgaatgtttctgtctccccaaaattcataggttgaaacctaatccccactgtgatggaagcaagaggtggaaactttgagaggtgatgaggtcatggggcagagcccttatgattgggatcagtgcccttatacacaaggccctgggagagcttcctcgtcctgttctgccacgtgaggacacagcaagaagccgccatctgtgaagcaggaagcagccctcacagacaccaaatctgccggccccttgaccttggagtttccagcttccagaactgcgagaaataaatgtctgtggtttgtaggtcacccagtctgtgggatttcataatagcagcccaagtggactaagagagtggtaaaattaaacacagcaattacacacatttggggtctcccatatgacaggcaagtattctttgttatcaaaatccaaaatccaagactcaagggctgcaggagccatctctgcccatcccccacgttcatcttttggcatctgtccccctcctcccatggggcttacttctatttttattatttctggctcttacctcagggcccttgcacttgctgttccacttgccaggaattctcttccctgcttgtcttaaaactgattcttctcatccttcagtgtccataagaagtgtggcttccttagggagtgtttctccttccacccttgatgagctggttgcccccctccctcactcactactgagtccccagggtggggaacgcatctgtactgaccattactgcaccccattgcatagtcctaatgcacagtagaaacttgataaatgtttccttccttcattcaacaaatatttactgagcactgacggtgtgccaggcatgacaacaagtgtttaaaatacatcagtgctcaaaacagccaagatcctctactctcaaaaagtgtaaatatttttttcaaatcaatgaccgagcccgctgaccagaaccccagacactgagtagctaagcagaaagcagctgcaagggcaatgcaggtgaagggaagaacaagccgatggcccagaaggcaggatgagaatccgagatccactctccatgatctgccatgagttccaccagaggcctggccatgccttggtttcccccagcccacagcctgcaaatagctcctcgaaacccttggggtgttatggcccctgctcatcctcctgagggcacaggcagcgaactgagaacccctgtgaatagcactctggaaaagtcaagtgccctccacctgctgaatcacacttgacttttgctaaaatcaagacaattacaagattgttcctgatcctatttagtacggctggatggcccttgagccaaattagagggaggatgggcctggaatgagagaggatgagataggttccatgaagctcccataagaatttcactcttgaggcgatgccacagccctggcaggctgcacagaataaaagtccaccttggttagatgcttcacctgtttctaaaggaaactgtactccatcattgttcaggaacttaaagcattcatttaaaaagtaatagcaaacactcagtaaaagcacactttgaccacccactcttcagaccagggccccacccgtttcagaaataaccattcttaccaaattagtgcatgcctcttccagaattttctatgcatttacatacacatgtattgtttaatttttttcttggttttgttttatataaatgagttatattgtcatttcggttcaaaagcttttcttcctctacattacattctatcttgaaagtcttattagtacatatatatgcttttttttaatttttagaaatgggatctcgctttgtcacccaagctggagtgcagtggtgtgatcatagctcactgcagctttgaactgctgggctcaagcgattcttccacctcagcctcctgagtagctgggactacaggcgagcaccaacacacctggctaactttttaaaattattttttgtagagacagggtctcagctcgctatgttgctcaggctggtctcgaactcctggcctcaagcaatcctcccacctcggcctctcaaagcactagattataggtgtgagccacactgctcagcctgtctattcttgtcagcttgtatgtagtactccacagtaactttgtcattatttattcagcattaaatcattatctattccactgttaataaacatttagcttgttttcagtttttccagattccacataatgctgtgatggagagccctgttcacaccttctccctaaggtactgctgagtgtcttcctagagcagatatctacaagtgaaatcactagttcacggagcacacacagttattttaacgtatgctaccaagctcccccatcgtggctggattccccctcccacagccgggcatgagcatgtttatccctccccttaatgtttatagggtcctctttttttctccaacctaattgatgtttttccctaaatcccatcaggcctagtatgaccatcaaatgcagggtgccattggacagccctgagtaagaactgattgccaagtaaaggaaatccttagactgaatagaagaattatccttcaatattccaagttttttctccaggatccatgacatgctcatggtccatccagaaaagacatccaatgtagaagacagagagctggagtaagaggaagaaacagaagcaaaaacactgggagagcacactggctttgggccttagaacagcgtgtggccttgagcatggctctccaacactatgcatccttgtgtcccatgtctgaaaccgtccctacctcatacacttaccataagacttgaagaaaattaaaaatgccaaaaataccatactgagctgctgtcgaggttgtcgactgccttaaacaagagttcttaagcacagtgcaaacccctttttagggatgactatttccaccaaaaatgattgaggaaatccttccccatctcatcaacacaggatggaactcaaagtcatgcctaggcaaaggatatttggtcacagagcagagctgagctgcagcctcccacgagcattaatgattaagtgaccagctagttgctttttacacactcccctggagggcagtggggcatctctggacatggcactgatggaaaccaagccccaggtgaatgtagaggagtggatctcagtgttggcggcgcactgggatcactgcggggagcttcataaaaaaaggatgcccagagatccagatttaattggtcttagaggtgacgtggaggtgagattttgaaaagctcccccagtgattgtgaaatgcagcgaggttaagaaccactgccttagggcagttacagatatcaattctgaccatgcccttcaactaagaagaagagccgggatctgtatatttccttttttttgcaatttcttactgtaaaaatttttttaaaaggagaaaaagtagtgtcctaacacaagagtctcagaattgagaacgtgtgagacaaagatagcgtgagaccaagaggaacagtggcaatacttgaacgaaacagcagaagacaatggtgaaccatgccaggctaactgcctccattacacccttagtaaaaaggaaggggatgttgtagtttgctaggcataattatatgtgacaattttgaagtagggtttaatatttgactttaataattctcagtgaattccttgtgtgtcatcagagattagagttcaaggaggctgaggctactggaatttgcagggcagagaagcagaaaggagaaacatacaccaagaaaggattcctcaagtctgttgctgaacagtaaatttcacttttgcggaaaaaaaaaaaaaaaaaaaaaaactccataaaactaggcatagagtgaccagagaactataagtttgaccattcctagagctcactcagggctacagaaccttcaggctccaaccaggtggggtggagagtctttgttaatatccaaggcattcagttaagagcccagaaggattctgcagtagtggcagaaataagcttgcctggggaaaaggctgctgtaaacgcaagccagggtagcttcaccagtcccagaggaatccaagtaatccccagggagctcaagctcaggcacttgattgcctggactaagtcaaacaccctttgaagcaagacaactaaatccagcaatcaacaatgtagattcaccacatccagggtttcatgcagaaattactatacataggtagtagatatgtaaaatgacaaacatcataaaatgtgaattgcagaatcaaggtggtaggtatatgtcttaaatttttttttataataaaatgtaggactgggtgctgtggctcacacctgtaattccagcactttgggaggccgaggtgggcagatcatgaggtcaggagattgagacaatgctggctaacatagtgaaaccccatctctactaaaaatacaaaaaatgagctgggtgtggtggcaggcgcctgtaatgccagctactcatgaagctgaggcaggagaatcaattgaactggggaggcggaggttgcagtgagccaagatcgtaccactgcactccagcctaggtgacagagtgagactccatctcaaaaaataaaaagtaaaaaagtaggaaaaactactacataggcatataaaagagaaatataactaaaataactacaataaaagttattcaataaaaacagactcagcaatgacagagccaatagagacaagcacataaatcagctactatctgtgcacatgtccagaagccatgttaagcagaacttgttttaagttgtttataatttaaatttgtggatacatattttactttttttttttttttttgagatggagttttgctcttgttgcccaggctggagtgcagtgatgcaatctcagctcactgctgcctctgcctcccaggctcaagtgattctcctgcctcagcctcctgagtagctgggattataggtgtgcgccaccatgcctggctaatttttgtatttttagtagagaccgggtttcaccatgttgggcaggcttgtctcgaactcccgacctcagatgatctgccagtctcagcctcccagagtgctgggatttcagataagccaccacactcggcccatattttacttttcttagggacagggtcacccaggtgggaatgcagtggcacaatcatggctcactgcagcctcaacctcctgctcaagccatcctcttgcctcagcctcccaagtagctgggactacaggcgcaggccaccctacccagctaatttttaaaaaaaatctttcagagatgggatctcactgtgttgcccaggttggtcttgaactcctggggtcaagtgatccttttgccttggcttctcaaagttttgggattataggcatgagccaccatgcctggccaagaagaactttttaaatacttttttctaaaagaaaaaaaatgattacaaagcaaacagaaatactctaacattaccaattgcaggggagagagtcaaagtacaaaaatgattcacaaagcagaagaaaatgaaagtgataagcacatgaggaaaataatcaaccacactaacataaaacattgtaagtaggataatatcagattagtcaagattttaaaattctgtgttcagtgctggtgaccatgtaagaagacactgatccacagctagttgaaggtccattctgggttcctgtttcctggaaagcaatgcttagtgggacgggtaacttcctcatgtgacacagctggtagcagtgctggctggctgtgttccatgtctaaagtcgcagaggctacaccaggctggcaccgtggtctacaaacctgccactctctatcacctttttatttatagagatgagatgggtcactctcagacaaaaataagaggcacagttgtgggccacgacagagcagcaagcagggaaggtaggtccccagatagcggcctgagaggaaggacatacatgtgtagtggccctagcttcactcagacgctgtgtataagttgggggcagagaaaggtgtgtggcagaggaaggcccagctgcagtgtgttcccccaggcagctctgcgggttgaggacacagccaggtcagtcctttctgctcccacatctctccctaatcaaacctgttactggggaacctcagtgacaggctgggttctaggtgcatctggggactgccaaacataacatggcctaccacttgggaggaatgcaatatctgatagtccagtgtttccaaaggttggtaactgaaacagagaagttaaataatttgcccaaggccacacagctgagtcaaggaagtggggcttgttaggcatttcggccacctgcaatccaccttccaaattgcatccctatctttgtgtctcttctactattatttaccttaaacagttttaacttgactttaagtaaaactactttctaaagatttggctcaataaaaaggttataagttttatgaaaaaaaattaagttatagtgatagaggtaggaggcagccaaatgcctagacagatagagaagggtccccagtgaaacccaccttcaagtctaaaacaggctaaggactgaaagacgggaccgctggttttggatgaaacccgtgacccagaaggagaacttctgcctccgtttgcctgccctttcctgattgattctttctgaataatgcctttcaaccaatcaaatgttgccttttccgatactacctatggcttgcctgggcatgcccacctgtgttctaggagaatgggtggagccaccaggaattcacgtcttatgcaggggaggagcctgggcctcttcacctcctgtgcagcagccctggcattcaactgtgaagggaaaacctgcttggagagcccctgtctttgctgggagctttccttttgcttaataaattccaccctcctcacccttcaatgtgtctgtgtgactcatttttttctggtcatgagacaagaacctggatttagctgaatgagggagcaaaaatcctaaaaaaaaaaaaaatcatagatgtatattttgtatatatttaaattcactttaaagtaaatatataactattaaaatgtgtaaaaaaatcatcacacacacaaccagcagtaatttttgacacacttagggggcaagggctcccacgacctctgaactatcctgtgggtatagctgcagggctgtttgttcacacatgtgatgcgtggcctctacttgttcacaagaaacacagtgagaggcagacaatttgctcactgtcagcctcaactggaagaaggctcactgctggatgctcctgtgtggaagtttcccctctctccaggcaggcaggcaacagatcccagcccaacagacagcccccatgaggctccaatgcaccctcggccacagtattgaaggatgctgtttggaccagggcctctaatttccccttcatgagatgtgccgggtttatgatgtctctttcccagccccttgacttccaagcactgcccaaggaccccaacctccacctctctgttttctgcttttcagagtgagaactgttcgcccctgatggtgaagtctagtgactgatccagaggctgctttctgcaaccctgctgggtgctcagatgtcccttcagttgtgtccttgtctaagctggagactaaaaagcgggacgaagagagtcttcctctctctcctttttgtcctctctatcccctctgcttcctctctcccctccttctcctttctcttccctctgccctcttctctctcctctttctctcactccagtgtgtcttaggcctatttcccaaataagagtacctgaaagatggctgctagcatctcagggctgtctgcattattcattcttctactcccaaccctctatttataaccaagccttctggcatctgaaataatgaaaactatcctattagcagctttccgatggtctagactgctctttggaacatcccaaacacttttgtattcaagtttctcttctgactacaggtacttctcactctccaaaatctgactgtcagagctcaggaaccagcagtgccagggacacccctccttaggtgaacctcccactctctgaaccctcaggaaccaaacagactgaagcaagttgcttgcttttgttgcctgaactcaccgtccaaattctcactctctgaatttaggacctgaagagatgacagcaagggacactgtgtattaaactaactcagctgtaaccaaagcatctgtcgacatagttccactgcagcttcctcacagcagaacaacagggaccaaattctcacacagcaacccccaaaggcattctgggacaggcagcatccttcagaggctcacattctggtcagataagttcgataatgcgtccgtgttgaatgcagcagatgtaacccttccagcagattcacaaggcccaccagcccaagctgggcttcacaaatgcgaaggtctctttgctgcaagactttctagagctaaaatctatttgaacatacaccctttgttcaaatagcccttaatatccgatgtatcttgtatgcttccaaacacacccttggaaatccagatttggggtgcatatgcagattcgtgggttttaactagcactttgtcctaagacataagcctgcagtcaccacaaaccaggtctgcagaggggtccagttatctgaattttcaagatgtttccctggtgattctaaggtatagctctggttaagaagaaatgttatctgtgacattttgtgcacaacaaggacgtaaagaaaatgagtgcgtgtggaggccgtttgtgggacttcagacacgtaacatataacagtgatagagtgagatccagaatctcttgccctgaaaggcaaaggtcttttttaaaaacaagttggcccagcatggtggctcacccctgtaatcccagcactttgggaggctgaggtgggcggatcacctgaggtcaaagttcgagaccagcctgaccaacatggagaaaccccatctctattaaaaatacaaaattagcctggcgtggtggcgcatgcctataatcccagttactcgggaggttgaggcaggagaatcacttgaacctgggaagcggagattgcggtgagctgagatcacgccattgcactccagcctaggcaatgagaatgaaaccccgtctcgaaataaataaataaataaataaataaatgagtttttcttaaggtttgaacaaacttctgggtttttgggtaagggaggtgggttagggtttctgggtctcattgctaagctccgagattcattagaacgaaagcagcaaggctcacctacccacacagtccacaggagaccctcgcaggggaaaaccctgattctagacgtaggtggcactttccttagtaacgtgaccaagtgcacttgatagagtggtcctgttagcagcagtgaatccatatgatctgagacaactcaattcttgcctccttagaagaatttgactaaggggcataaggtagagggagagactgaggcaagttttatagcaggagccaaagtttattaaaaagttttaaggcaggggccaggtgcggtggctcacacctggaatcccagtactttggaaggccaaggcaggaggattgctttagatcaggagtttgaaaccagctaggacaacatagcaagacactgtctctattttttttttttttaagttttagagcaggaatggaaggaagtaacatacacttggaagagggccaagtgggcaactggaaagattcaagagcacagtttgacctttgactgaggttttacacgttggcatgcttccagggaactgcatctctcctcttctgcttcttcctttggggtgagctgtccgcatgcccagtggcctaagctcttgggaggggccgcatgcacggtgtgtttaccagagctgtggctgtgcgcatgctcacttgagtcgtttggtcaccgaccggttaaatgctatattgcttcttaatgcacatacttgagcccacctgccaactcctgagatcttatcgggaagctgctgatcaccagtttcaggtttttctatctattgggagactgccttttcttggtactgcctgcaatcaattattattttagagagagacagtgtaacaaccacctgaccctcacctgctggtcgcctgacattcctggtgggggctctcccgccctgctcctgtctgcctaactacctgctctaacagtccagtgggaggaggttggtcctaagcccactagctgctagggtaaataacacggtctctcttttttttttttttttttttgagatggagtctcactctgtcaccaggatggagtgcagtggtgtgatctctgctcctcactgcaacctccgcctcccaggttcaagagattctcctgccgtagcctcctgagtagctgggactacaggcacatgccaccatacctggctaatttttgtacttttagtagagatggggtttcacagtgttggccaggatggtctcgatctcctgacctcgtgatccacccgcctcggccttgcaaagtgctgggattacaggtgtgagccaccacgcccggccaacatggtctcttttggtctctgtgtcctcttctgtaaaatggtgacagttcctgccctgctcaccttgaataagaactttgaggataaatacattactgaaggtaaaaatgcattataaactctaaaaatactacatacatgagagctgattttgattgcttaaggtgcaaataagcccaggctgactgaagatgatgaggtgaccctgatggccgaacctttacgaatcctttccttattagcaagttgacttagtgggagctttgtttcctcagattctgtggctagaaagaccccttattttcctgctgccagggtcatctgtctagaacataaatctgaccgtgtcactcccgctccttcttgtcagatctcagaccaagtgtcagctccatagagaggctttctgctgtcctccatctgcaactgcagacctttcttatacccgagagacactgcagactccctcctgacaggcaccatgacatcagatggctttatttatttctttttcatctctcccctctcaagagaaggcaatctctctgaaagaaggtaaggagatgtttatgttattaaccactctttctaggaagggctagatcaatgctgtgcaggtacctgatgctgagagaaagagagagagagattgcaaggggaaccaggaaaccatcaatgttgaagagagagttatcctgatttccaggccctgattccaggttctcatgaggcctggctgcttatgggttcaataaaagcagcaggatcatgggttttttccaatacattctcacttttgcttaaagcaaattaaaatggtgtgttgttgccttaaccaaatacaccctaagccacatctgccactagagaagaggcctgtggctggcagggactgttttctgctcactcattgtgagtccccagggcctggcacagtgatgggcaaggaaacacctgtgaatgggtagagtttatctttatctctgcactgcacaaaagctcagttctcattttccatttacaatgttccaaagttttccaacataattccacaggtcagaggttacaaactgactacccagctgttgaattagcccataggcttttttttttttttttttttttttttttttaagactgggttttgctctcgttgcctaggctggagtgcaatggagtaatcttggttcactgcaacctctgcctcctgggttcaagcgattctcctgcctcagcctcctgagtagctgggattacaggcacacatgaccacgcccagctaatttttagtatttttagtagagacagggtttcaccatgttgggccaggctggtctcgaactcctgacctcaggtgatccacccgccttggcctcccaaagtgttgggattacaggcatgagccattgcacccggccttgttttgttttttaaaacattgtttttacctggacagtttttgaagaaagaaaagaaggaagcaaagaaagaagaagaaaaggagggaggaagaaaagaaggaagccaacattttaaaatggagtgagttcacatgaaaatcaacattaccagcccctctttaaaaactcgaatattttacagcactaagctctaaaagacctttctacttttacatcttatttttgatggttcagaagaaagcaatctgttcttgcatttaaggtaataaaatctgagaccccagattcctaaagggaaatgagtacaaacagaaagcttacaaatgtgttttccctttctctctctcctattatctgtcccaacaagaaaaccctgccccttccagggacagatgctgcaggattatagaacagtggctcagctgcggactctgccagcatccctgcaagaaatgcctctaagtccccacagttgcagccacatcttctgctgactggagtcacctgtgaagctgatctgcatatggcttctggccttgtttgttgagaaacctgctaaaacaaatgcaagtgtcgggagcggctcattaaagtttttgcgctgctctgcagcacggccctcacttcctgaaactctcatacctctcagagacttcgggtttttttctttctgaaagtctcaatcctggtgccccagggacagcagaaaagcccctcagagccccccaaacagggcatggcccaccaaaggccatggcagtatccacccattgttagaacacactttccttttttttgatgtggttttcactgggaaaagatgggatgtggtggcgaagagaccaataaacaaaaagttaaacacttaagtatacaatggttttctgaaaaataaggagagagagcatgcaaaaatgttactttcaacaactggaaaaaagctctgaaagtccatgcgtcgggcagtagccaaatccatgttccatcttaagtaggtttccctccctccctgcctccctcctatccttcctcctccctctcttccttccctttcttttctttctctctttcttctttccttccttctttgtaaaatcttgccaggtgcagtggttcatgcctctcccagcattttggaaggctgaggcaggaggattgcttgagtccaggagttcaaggtcaacctgggcaatatagtgagacctcatttccaccaaaaaaaataaaaaataaaaattagcttggtgtggtgacacatgaataggaggctgagtaggaggctgaggtgggaagatcatttgaccccaggaggttgaggctgcagtgagctaggattgtgccactgcactccagcctgggcaacagagcaagagaccctgtcttaaaaaaatacatcataaataaaatctgtcccgaaactatcctgactttcatcctccccagattgggctttgtcttcggagcctccatccccagatttctcggcccagagcttgcagatgttttctttgctgcaggctcaaagtgcattttgtgatacatggctgtctcaggccaggttcccccaggagcagacacagagacaggggactgagagcaacaactggctgggaggtggcccagcacctcatcgtagaagagtgtgggaatgagacagggacagaaggcagccagcggagggcaggctgtcacacaggtcaccactgtggcccctagagtccaagccctgaagaatcctgggagcctgtggagcagggggagctggggtctgtgttttccagccccatccaccagcagctgagggctgatgccacgccttttccctcccagcacttctggctggtcccaagcatgtgagcctgcagcagagtgaggtcaaaaggctcgcctagaaccccaatcagggcgccgcagcacctgctccaacttgtccagccccgggcccacctcagttaacagagcagtccctcttccagccaggaggcccttgtggcgaggagaatgtagaggtggagcacatggaggcaatgtacttgtctgggacaatcatttccttactcttatcacaacaaagccattccttcactgtactttagagacctctgtctcctcatgccccaaagatgttcagctggggttctcctcaaggagacagaaagcaatggaccttagattctgcgccagctgctctcttctccgccagggtttacttgggcactggcatgttgaaatgctgcggtttccaagccaaagggcttttctctcccggcaggcctttccagcttcctcggctgcgcggttcttcctttgtggcaggaaggctgggacttacggtggggttaattctgatcgtgtatcactggaacattctttcattcatgtgctagtgttcacagctcactgttgcttcaaagaagctcagtgcgtgagtatttgatattttctttatcgagatgctcagttctctgagtcgctagagcgtctccctttacatccaaattccagccccaccacagttctctccctcttcacagccactgccctctcatctgtcagtcactcagctctcatcagagtaaaagaacagccctggggctgccacaaaaagggctcttcactggagcccagccagcagatcccaactccaagtccctggaattagactcagctcagtggccaggctaagccccagcttgtgccggtgacaaatgagcgctgggcagagcaggccaggagggctccactgttgcttgaaagaaactccgatgaggtgagaatgatggaaaagcaaaagaatgccgtgcaatgcgtgtgtgcataacagccctctctgggaggaatcaacagggctgggttaccaattagatgtggagggcgagggagacctcagacccctggcttggatgaggggagtgtggggaagcaacaacaaaaacagggactggagggcaggcagcctgtgggggctggatggtgtgggaggggcaggggaaggctgctcaacagacccgtgccatctttcattccaccgatgccctccatgtgctctacggtgtgctggaaacacaacaggaagcctcacaaagtatttgtctttatggagctgacatgctgctgtaagaagtcacaaaataaacaagatgctaataagtcaacaagatactttcacagagtcccttggtttggttgtctttgtggcaataagacagagagagagaaagaaagaaagaagcgctggaaaagctgtagacacagctgcagatagcaggagttcacagccctggccttgtattagaatcacctgggaaggttttaaaaaatgtactcatatcggcagggcccggtggctcacacctgtaatcccagcactttgggaggccaaggcgggcggatcacttgaggtcaggagttcaagaccagcctggcccaacatggtgaaaccccgtctctactgaaaatacaaaattagctgggcgtggtggtgcatgcctgtaatcccagctacttgggaggccgaggcaggagaatcacttgaacctgggaggtggaggttgcagtgagccgagattgagccattgcactccagcctgggcaacaagaggaaaactccatctcaaaaaaaaaaaatacttatatctaatgatttattatatacaacacaaagaatacagtgataaaaaacttgataaattagattatatcaaaagtcacatcaaatagacattaataaaatcagaatatctggggttggggagtggtttggttaaaggccccaggtgcttctaaggtgcagccaagctggcgaaccactgggctaggcccctgcccaaaaagatctgacctgactggctggggagaagcttgggggctttgaatctccccaggtagctctgatgggaggtgtctgagaacccctggagagagatgctgaagctgctgcctccacatccatcccaccactccctctttgagtagcatcagggcagtgtgggtagctcaagtcagcttgggggctgtgcctcattgtgttaaaggtggtcccattatgtagacagtgaccaccccaggagtgagccagtgacataccagcagtgcattgccaaagactttggggaaagtttttttctcattcttaagaaagaacaagaagccatgtttgcttccctattaaacattatattaagtgaaataagccaggcacaaaaagacacagttcacatattctatataatttgtgggagctaaaaattaattcaattgaactcgtggagatagacgaaggatggttaccagaggctgggatggatagtgggaaaggtagggggtgggagatggggatggttaatgggtacaaaatatagttagataccacgaatgaggtctagtatttgatagcacgacagggtgactatagtcagcaataatttcttgtacattcagaataactaagagagcacaacgggaatgttcacaacacaaagaaatcatgaatgcttgaagggatggatggctgccccatttccctgtgatccgtgcacactgcacatctgtgtcagagtatctcatgtatcccacaaatatatgcacctcctaggtacccacaaatatcaaaaatagatgtgactgaaggagcttgtagcacaggtgacactgatgggaaaaataagtcttgggaagaagccaacactatggctgcagaaaacagagaacacaggggcccttgatgctgtaatcaagctgcctggtcctgaaactctcactgcctctgctgccacatatgtgagccactagatttgcatcctatttaagccagtttgagttgatttttctattactgccctcaagtgacacaggcagtcatggaaggtgcctgtgagaaagttcaacaccagaaccaagtaagaccaatggatggaaatgatccagccctgtgaaagcctcacagaagggatttgagcatgaggaatggaacccatccagaaataagaagacgcttggtgcattgatgaaacaggaaaaaatgtcatcgttaacaattccaagagctggcctggccagtcacagaatgcgactctgagcagggaaatatcagacacattaaagggcataaaggtcactcaagtgagtcacccagtattactgaggagcactccacatggcacaaaagagggcagaagtccagagagtagtcctgttcttgggatgcaaatggtgtcactggaagaagacgggcgtgctgcctataacaagggcgggtcagagctgtgatgacattcgacccctcaggttggtcccgggcagcacactctgatgattaaatcaggaacaggcaggcagaggggtgtgtgtgtttcagagaaagctggtgatttgctaaccaaaaatgacaaggagaaaaaaatcagaattcttatagcacataaaggacattaaacatggagagactttattcttctagagcattcatttaaagctcatgcctgcagtcctgagtgtttcccttcatcaaacaaggatcaagaagagaggaaatatggtcttcaaagtaaaaaaaaaaaaaaaaaaatgtaaagggtcgtttctgaaattagcctggaatgtttcattgctttacagggagagagcagcctccaagaagcttagcagcatctgcctcttgtctgagcttctatgtcagtttctcccagggcagattttattaaataaacagcaaagagtccgggctcctgagcggctcagaaactcttgcatctttgaggagcttgcatatgctcacgccactctggaaaaccaggtagagaggcacttttcagggagtccccagggtgctgaagcaagaagggcaataatttggttttctttaaaatatatatatatgagacatagtttcaccaggctggagtgcgatggcgtgatctcggctcactgcaacttctatctccaaggttcaagtgattctcctgcctcagcctcctgagtaactgggattacaggtgtgtgccactacacctggctaatttttgtatttttagtagagatggggtttcaccatgttgatcaggctggtcttgaactcctgacctccagtgatgcgcccgcctcagccttccaaagtgctgggattacaggtgtgaaccaccatgcccggccaaaaaattgaggtaaaatcttcctatataatttgccatctttatttttaagtgtacagtttagtgctcataaatatttataatgagggtaatgatttgaagagaaattcaggactcccaggccctctgtgttcctgctgactgagacaggatctgaagcaaggctcgaatctctctgcgatcagttttcttgttaatagagttgagatgcacttgtccctctgcttcctcccaggggcacaaaggaattactggcctggagagacttggaaacacacaaggagcggcgctgatgggaggagctggtttagaataaggcagagacggaacaaagaaggatctttcctggggtagagggagggtggtgggaggacaatggggagtgtggggttgggattctttccaaatgctcaaaagagactcaaaatagactcagtccattcatctcctttatgaaaaccctacaatatcaatgggatgattgctatgagtaaaaattaggaaaactaagagattcagtattggtcaaggcttatcagcagtcttaattgctttaattttagtcaatagacatcatcttcttgtataaggcaacgcttttgtcctggtgactggcaggcctggtacactaaatgccttagcaaagcaagctgggccccttggtcattaccattgcaaacatctgcacgttccctccaatgctcccttgcaaccctgctaaaaataaaatcgtcttttaataacctcaagagcccaccactgtctcctctctggaatgttcactgaggaccccagtaagaaatggaaattgcctcgaatgctctctcctctgccttgacagtgctgctgccggccacgcactctgttgggggaagggcagtgttgatcagaaagcgagctccttgactgacgttatctcctcctgggcagaaaccaatttcagcaagaactttgtaatttggaattcaaggatgtaagatgcattcagggaaccattttccccctacaaattacagtttgtcatttaagaggtttaatatcacaaaaagggcctgcttctgcctttttaaaaaaattttaaaaaatgccacaccgatgctctcagaacagaggcttaggaatgagaagaatggcctgtacttcaaacaaacccattgttccttactagaggcagaagaataatgtcagaaaaaatagttatttattcagcaagctcttgaagtgctcaggcagagtggtggaccccaatgcctggcatatagcacgtggatcccaatgcctggcaataaccacgtgaaggaaggaagaaggggagggaaggaggcagggaagaagaaatacgcagacactgtgtggtaggaattccaagacatagtacattattttatccaaacacaaacacagtatttaatcaagattttcccatgatgcactggggcaagacaatcatgtggggggaggagcccaggcagcaaatgtctagaatgagaagaactgggccacaggccaggctctcaagtcagagtcatgctgaaacctgctccctttctttctttcttttttttctattttttattatactttaagttctagggtacatgtgcacaacgtgcaggtttgttacatatgtatacatgtgccatgttggtgtgctgcacccattaatttgtcatttacattaggtatatctcctaatgctatccctcccccctcccccaaccccatgacaggccccagtgtgtgatgttccccatcctgtgtccgagtgttctattgttcaatttccacctatgagtgagaacacacggtgtttggttttctgtccttgtgatagtttgctgagaatgatggtttccagcttcatccatgtccctacaaaggacatgaactcatcctttttttatggctgcatagtattccatggtgtatatgtgccacattttcttaatccagtctatcattgatggaaatttggattggttccaagtctttgctattgtgaatagtgccgcaataaacatatgtgtgcatgtgtctttatagaagcatgatttataatcctttgagtatatacccagtacaaaaattaattcaagatggattaaagacttaaatgttagacctaaaaccataaaaccctagaagaaaacctaggcaataccattcaggacataggcatgggcaaggacttcatgtctaaaacaccaaaaacaatggcaacaaaagccaaaattgacaaatgggatctaattaaactaaaaagcttctgcacagcaaaagaaactatcatcagagtgaacaggcaacctacagaatgggagaaaatttttgcaacctactcatctgacaaagggctaatatccagaatctacaatgaactcaaacaaatttacaagaaaaaaaaataaccccatcaaaaagtgggcaaaggatatgaacagatacttctcaaaagaagacatttatgcagccaacagacacatgaaaaaatgctcatcatcactggacatcagagaaatgcaaatcaaaaccacaatgagataccatctcacaccagttagaatggcgatcattaaaaagtcaggaaacaacaggtgctggagaggatgtggagaaataggaacacttttacactgttggtgagactgtaaactagttcaaccattgtggaagacagtgtcatgattcctcaaggatctagaactagaaataccatttgacccagcaatcccattaccgggtatattccctttcttatcagttgtatgacaataggcaaactgctttatctctctgaacctcgttttcttcatttagaaaacagagcttatgcctattttggaagacattgttaattcactcaagacccagccaaatgcagtggctcacgcctgtaatcccagcgctatgggaggctgaggtgggaggattgcttgaggccaggagtctgagactcatctgggcaaaaaagtgagaccccaatgctacaaaaaattagccagttgtagtggagtgcacctgtggttccagcttctcaggaggctgaggcagaaatattgctggagcctgggaggttgaggctgcagtgagctgtgatagcaccactgctccccagcctgggagacagagtgagaccatctcaaaaaaaaaaaaaaagaaagaaaagccattcctagccctctttctttcttgtctttctcagctttaaagagcagaacactcagtgccccatttccaagtgtgatgatgagggcagtcggcaatggggcctacgagaaagccatcatgttcttggtaaagggaagatgttggtttggtctcctgaaaagcaaggcttctgagagcagaggccacgttttctcctgtgggaccccaacttgccaaacccagggctgaaagtgtggctggtgctcatggaaaacccaacttgaaatcaggaatggccggacctgccttgagctgtatatgttgcagtcacctttgaatacaaaggccaaaaaaattctctgtggttggctttggagaggttgtcaggaagagctgtaagaaagtgatgattcacagcaaagaaaacaatggatgaaataaaaaggcagcctgcaaatagggaaaaacacatctgcaaaatatcagataggaggttcatatgcaagatttgttaaaaactcatacaactctgccggtgcggtggctcatgcctataatgccagcctttgggaggctgaggcgggtgaatcacgaggtcaggagtttgagactagcctggccaacatggtgaaaccctgtctctactaaaaatacaaaaaattacctgggtgtagtcgcaggtgcctgtaatcccagctactcgggaggctgaggcagaattgcttgaacccaggaggcggaggttgcagtgagctgagatggcgccactgtactctagcctaggcaacagagtgagactccatctcaaaaacaaaaacaaacaaaaaaaaccccacaaaaaacctcatgcaactcaatagcaagaaaacgtgtaacccaattaacaaatgtgcaaaggacttgaataggcatttctccaaagatgaaatgaaaatgaccaacatcattaggaaaaagcaaatcaaaaccactatgagaaaacacctcccacctgtcagggtggctacaataaaaaaaccagtgataacaagtggtggtgagggtgtggagaatgggaacccttgtacactgttgataggagtgtcaattggcaaagcaactatggaaaacagtatgaaggctccagacaaaattaaaaatagcactaccatctgacccagcagtcccacttctgggtacatactcaaaggagatgaaatcaccatctcgtcaaggcatctgcactcccatgctcactgcggcacttcacagcagccaaggtacgtacacgccctaggggtctatcaatggacaaataaagaaaccatggtgtgtgtacaaaacaaaatgttactcagccttaaaaaagacggagatcctgccacttgccataacagggataggcttggaggacattatgataagtgaaataagtcagacacagaaagataaataatgcataacttcacttctatgtgaaatcttaaaaaaaaggttacatatatacacacgtatatacacacgtatatatacacacatgtatatatacacgtatatacacacatgtatatatacacgcatatacacacatgtatatatacacgtatatacacacatgtatatatatacacgtatacatatatgtacacgtgtgtatatatacacacatatatacacatatatacacacacacatatatactatatatacatatatatatacacatacacacagagagagagagagagagagaataaaacagtggttagcagggtcaggataggggagcaggaggaaacagagacatagctcaaaggctcccacatagcaaatatgcaggatgaacaagtctaaagatggaatgcacagcaggagggctgtggctgataacagtggatcctcttctttgctaaatgagaagattataactgcttttgccacagggggaggcagatgccttaaaaaaataaaatgattattgacaaagtgataaataataagagtgaaggaaatttgatgattaagtttgcaaaggggaaataaaacaatttgtccagcactacaccatagcaaaacaatgtgtttaaaatataaaacaaaataaaactgggtcagatgtatttattttttgttgttgctattgtttttaatttaaaattcagccactctctcaagggcctgctcatgatgaaaaatacattccagtttttacagctgccataagacctcataagagcagtggggtaatttcaagggacttctcttgaactacaggggggcccttggctctatgtttagtgaagtcttgcaggagacttgatgataaaaaccacacctgtggacaattccttctctaggtcccatgctaggacagagcttactcctccagcccctactggcggtccactctccaagctgccattcctttacccaggacactcacagatacaactccaacccacaccttgggtgagacatgtcttgggctaaagcgcgagctattattcagaaccccaggactgagaacccttcacagtacaaatgtgaggttgtttttttcttccttccttttttttttttttttttttttttttgagacagggtttcactctgtcacctaggctgagtgcagtgccatgctcatagctcactgcagcctcagccttctgggctgaagtgatcctcccaccttagcttcctaaacagctaggactacaggcatgcaccattatgcccagcaaatttttaaattattattattatttgtagagacagagtcttgctatgttgtccagcctggtctcaaactcctggcctcaagtgatcctcctgcctcagcctctcaaagtgctgggattacaggtgtgaggcaccacacctggcctgatttttttcttttagttagcatcaagtgttcattctggtccccaaagttcagcaaatgtataaatactgagcagcagtgtgcccatgcccctctccctggtcagcctttacaacactgaacacgtgtgttatgctcccaaaaacccctccttaagaatgggaatatgcaagggaaacacaacactaaacctcttttgttagcattcctgataaattcgcacttattactccagtgaaaattgtctgtatgcagagaaagtgctttaaacacagcagattggtcagcctctggtcccctctggctcctacaaactttccaatccttttactttgaagctgggtcactgcagtgaggtgcgtgttgttgttctgcagaatccagttgcatttcatcacagagctttcataagaatccatttatcaaattattccttcgaaaactggagtggcacagatcaaaccaactgaggagctgcgtgacactttaagtcccgatgtcagtgctgcccaaatacaagctagattatcaagtgcttttcaagaacactttaatgccttgttctcatgaactctgacagtctgacgattaggattaaaatgggtcatttgtaggaattgcataagggccggaagttacagccctttcagaaagcacttctgccagccctcccaccaggagtcaggggtggcccaggatggatgggtgtgtcagctgggctctggaagctcactgtggcaccctgtctgcagcagatgtctgtgggggccccacttgcacccccttggttcctggcatctgcatttctgctgaccagagggccaacagcctgaatgcacttcttttcctgcaggcttgcttctgtccctggaacccactctgcccatagatgtggcaggccagaaatgccagggaattcagctctccaggagtgacccttggccaatggctgacagaagctaacgaggtgtgccccagatctctcattcattcgtgggtaaccctgagtcctgagtgtaagttcccccagagtggctaactccagtggcccctggctgactgggtagttactcaccttctgctgctgtcttcccctccatgcctcgcttccacactcccctatctgtgcttcctgggttcacttcccaagtaaaccacttgcactcacatcctggcctcggggtcggcttccaggggaacccagactaagacactgctatccttgctgagatttaagacggagcgcacatctcccaggctagggagggaacacccaaagccaccgctttcccagagactctgacccagctgggaccattaccaatgtgcatcacttgaccctagatgtgaaatcaagagccggaagaagccatcacagcagacacagcagtggccaccccatgagtttccagaagctctcatgtgtgctccaaggactggagttgaacaaatgggaggaggaagaatgaattgttttcctgctgtatctccttctacaggcagctttccgctggctgttgtccctcttgtcatcttctgtaggcttagagagaaaatcacaaggcaagagagaggatcttgcaagcatagagctgtgaggtgtgatgaaattgtcaagttcctgtgagcccgcgtgtgagaataaaggaaacttgcatctttgtgggtgacagaaacaccagttctgttagcagaggcctccccaggaaattcagtgtctgtaattctcttattgtgagaagataaatagcattcttattttgtgaatttgaacccatcaaagttttgtagttgagaatgccacattcatgtccatccaaggagcattccctgactctccacagtagggctggcctgtgctgagagtgggacacagggaaagaacacatagtcccggcctcttcagtagcaaacagaagagagacatacaccaagaaaaaatggcatgaaatgacattcgccacagtgaaaaagcaatgggccatgaaatatggggcacagattcagtcactgaaatcggggaggttccagaagcgagtgacatcgaagctgagtgttgagggagaactgttagcagaagaaggggcatgagcagacaacattccaggcaccatcaaaaaggcagagaagcaagaagaagagctcaaagtttaaagaacatcatcttattccaaataattgagaaaatgttgctgttcacgcaagtgcaaatgatgtggctattttaatgtatgttcacatttaacagtgttttcttttttgtattaagtaaaatacaggactcagtagacaaccctgatgctccatccttaagcttcaagtgagcctccccagagctgagagctgcagggtacaggaagtgggggatgccatgtggaggtgagtaggggaggaggaagtgaagggcgggagcaggcaagggaagtcagagatgaggggcatggtgagttgcggagtgtgagaggtgatgcagggagcagcaagagatggaaataggagggtggggatgacctgtttatgttttcttaatgcaattggtttggggaccatcacaaaacatacaacttgtcaaactgcccaaggccctccagctctctccctctctctctcctctcttcctgtaacatgcacacagacattcaccacaaggagctgtattcctggatgatcaaccaaatggactgtctagggcctgtcattacatttccatgactgtctctaaatcactttgtcctgatttcagaaccaaggcggtaacctcccaacccaatttccttgaatcttaccaaggtgatggtgaattagtgttgatagtaaataaagtcagagctttgagacattattgaagaaaagacacaggaaaataaaaacaataacattaattagctccaagtcagtataatttcctatctaaaataataaagaggctttaaagaaaataaccactaaagcctatctttgtgccaaaaagtccacagagccttatcttctcacaaaggcccctccaaaggtcatcaaccttattcccattttggagagacctcagcctctggaattgctgcaagaaaagtatgactgccccgaaggactgaagcattcagatttcataaaaaacatctgtttgccttttatggctggttttacagaagatggagatgttagtaaatattccatttcttaaaaaatgtcagtaattttagtgactttgtccctcagtaacacatgaaaagtgaatggatgatgcaaatcttgaaaagataaacatcagtatttacataaggagcgttacccaacgaattgagtggagcacagaggggattctttctaagtaataagagactgtcctgaacctcaaaacacttccagtatttgtggagacaaaattcacaacaaagaacacagaatctcacatggcgtcttgtggggtgggctggaaaatggtgagagcccacgtgttctccaggaggagcaaggcatgtatacttagaggactttacagtttacagatgactttcatttttcacgatcgcatttaaccccccacaacaagcaggcaagcagtcttctgttctacacaaagctaagaggggcccaaggctgtgcagcactaggaacaattctggaacttgaaaccgaagtcttctaggtccagccctgagcgctttctccagaaactctgcaacagacctccaaggtaacaccacactgctctcaccactcggcacagtgaccatccttaaacgaatggatgagcactcagaagaatgaatgagtgaaccctgcccccacggccctctggctcactccactctcctcattctctaatccctaaaactccaggcttttcactattcagtggccgcaggaagactccgggtttttcatattttatgcatacagctcctcagagggtcgctttctaataaaagcactgagcattgcagagaaaaatctttctttctaatcaggagaaaagggctttcaaggtccgaggctgaaatctgcgttgtgaacgttcagaaatgaaatgcatgtttcatttgcaacttttgaaaaggtctgtgaggatgcatttggcctaggtttaaacggaaaatgccttcatactttaatatttacaacataaaattaattagtttttctttgatgaaacttgaatcattcagctttcagaagccaatttagcatttccattttgttctcttctacacacaaacatgcacacacacatatatgtgtgcttacatatacatgcatacacagtcacatctgtatgcatcacatatattcacgtgcacacctacacacctgcacatatgtacagtcacacttcattcttctcatgcacagactgatttagtcaacacagaagagtagaaggaatcagtattggactgcgccgcctgctgtgttttaatattcaactatttaattccaactcttaatgtacttcccccttgctattctgctgatgtttcacttttagagactccactctgctgaatcattgtaccacagaattctgagttggggcagcttaaggccacctgaggctacttcccctctaaagcatgaatcctctcccaacagtaaccagaccaagaagttcagactctttgggatgcatccaggaatagagaacttgcgccctgctgaagaagtctcattctttttctcatgtctcctgactgcaaaggtcttcaggtcataaaattcaagtcctgtttctgcttctgacccgtggattaccacagacacatcagattctgttctaagccctaggtttagcaagagggtattggaacaactgatctttaaggtccaactaagacgttttaataatgcagacacttaaaatatcctgccttatttggagccaaaaatctccttccttacagtgtccaccccctggtccaagctctgacctctgggattataccttcatccttgtgtaagtgagtgatagctgcaccatttcctccaggcgggactccccggctctctgcaaagctgtgtcctgggtacctcttgtgcctgcctcccatcattgtggtccacctttcactccagccgttgctgtggcaaccagcttgtgagggtggagcccaacagctcctcatctcagctgcactatattcctcccaccttctgctctagaggtagctcaccttctgatgctccattgtggagtctacaggccagcctggaccagagggaccaaacatctgggtgttttcaggattgaggggattttggggttgcagcagggcttttagtttgaaaatcaggacagtcccaggtcaagtgggacaagttggtcaccccagcatgggtttaggagggccttaacatccacggaatgaccctcagcaatggggggctccaggagctggcagctgaccgctcccctcctcctgccctggacagacttggtgggtgcattctatacatacagctcctcagagggtcatggaagcatgaggccccattgcccacagtggtgattaatttggtaactccccaattagaaaaggcttttccacctatcttgttttgtgctcctcagtccccccatgtctgttttctagaataggatctcacaatgaatgaactacacacaagttcagctttgggttcagctttgggaggggattccaggctctggcaggcacctgggaaatttggataatgaaaatgtcacagggttgcacgttttggatgctggacttctcatcctaaggtccagatggcattcttctagagtgaagatcatgagaaagggtcttggtttcttgacagcttctcagtattcttgcttgcacatcaagacagccaggttactgcagaaaatcatttctgtagttgttggttcattttctcaaaatacgggatttgggggttacgtctgagaaccacacaggggatcttgcctctgatcaaaatcaaatcaaaacacctcctgtggtgacagagcaggcattttatttcctgacaatatttctcccatctgattcaatttcagcaaaggaaatttaagtagatgcaggtgaaagaattgagaactgagagctacctgacttgtgttcctcagtaaaaaacaaacaaacaaactgaaatatgtttaacggaagagggggagaagcccactaccctcttacacatattctgagtcaagtcgagcttttctggggacaggatgaggaaaccaggtgactgagtatttctccagtactcatcatgtggcttctgcagcacattacacaaagcatcttactttattccttagaatgaccccaaggtgacctttgcccttgtgaccccattttatggctggagaaactgagagtcaggaagatgagggaatttcaccaacatcacataactagtcatctgcagactggggctcaaatctgggcagttccagctccaaagtctataaccctaaccagtgcactgtctggcctctctagagaagtagagttcagacagggtcagggggcccctttgtggtatcatcccccttcaccacatctgcccttctatgtcattacttgagctctttcctctaaggagaattcctttcctacccacccccaccacccctcaccccagccccctgccccacagctccggctgtgaaaaccctgccagtccttctcggcccagatcatgcccccccgaccaaagcttcttcagctacgtgctgggcagcatcccttccgccactgaattcccatagttgttcactatcgatgctatgtaaatgcacacatcaaatacttaatgaacacttactatgcaccaggccctgcactaagcattttacacagatgatctctacatcaactctatctcaagttactattatctttcctattttataactgaggaaaacaccacccagagaggttaagtatgatggggcccactctttcactcccttctagactccaggctagagaaaggagtgtccacagtgacacaggccaccaatgcagtttgttggccaaaggtgctgcagcacaataagttttcacatcagccttgatgtccaaagctttttactggccccttggtactgcaaactttcctcctggatcttcctcccactatgtctagcttcagccttcaatcaacagaaatgtattgagtgcctgctacattctaggtgctgtttcaggtgcccagaaggttctttttattgggagatagacatgatagataggtataaaagaacatagaaagataccaagacctaccaccagcttctgttttgtttgtttgtttttgcttaagataaattatccagaacttgataagagacatctgaatctttctttccacaatctattaggacccaggcattttaaaattttatttattaattatttttttagagatggagtcctctctgttgcccaagctagagtgcagtgacgtgatctcagctcactgcaacctccgcctcccaagttcgagtgattctcctgcctcagcctctgtagtagctgggattacaggtgtgtaccaccacgcccggctaatttttagtagagacagggttttgccacgttggccaaggtggtctcaaactcctgacctcaagtgatctgcctgccttggcctcccaaaatgttgggattacaggcgtgagccaccacgcctggacattttacgattttataaaactgttaaggtgcaacaaataattttctgtctagtagtgacaataacttccaagggtgggattttattgccctgcctggtattaaccagttttgatctaatttcatacttctatcttagcatttattttttccctgctgacattaaaatcccagttcctcatatttctcttgtgaacttggcttgtcattaatgaattaaataaaatgaagagatatttgaaagttgcagctaccaggataaagttgctcttgtcagacctggataaaatagagccaggaaggcataaaaaaggagggagggagggtatgctttcctgtctgagatgagaactgttccaaggactgtctgaaaaccccacaggaaatccctcatgtccttcacacatctccagctctgcacggcttgcatgtttctcacgtgtgcacgtatttctatgacaaggtttatcactagacagtctttaggaccatggcaattcagataagatgctctcaaagaacacctgctcaggaatggcatctccaccaacaaattcatgccaactcaggcattgagcctccggcacccatgaattctgtttctacacagtgtaggtaaacttcccccttctgccaataaagccgctctttacccttccctcagcagatatatccggggcttgccacagtgcaacctggattacaatcctcttctttactttttcttttggagatggggttttgctctgttgccctggcaatcatagctcactgtagcctcaaactcgtcagcttaagtgattctcctgcctcagcctccagagtatctaggactacaggcatgcaccactatacccagcaattttttaattttttttttcgtagagactgggtcttgctatgttgtccaggctggtctgaagctcttggcctcaagcaatctaccttggcctctcaaagtgctgggattacaggtgtgggctattgtgcccagacatcttttctaatcactgaataaattcaacatatttggacgtatttttctctgatgtctttttttaggttgacaaatgcatactacaaccatatgggaattatgtttttttaaatttttaatatcctatttgacaatcatattcagagaattaaaatgattgatgtaatcatgagtcaatgagtggtccctctagaatgtgtggtcaggaaagacttttcagaagaggggcatgtgagctaaaggccaaaaacaactgggcctgcgaaaatgaggacaaggttatttcaggtggagagaacagctaagcaaaggactaaagcagctggcatgttcagtggcaacctgataaatgcttagcagctggctgggtcaggggagccctgatctgtggtgtttgcccatttctgtggcgtaaatactcccaggattttgagcgatgatgcaaggtcactgagtttggagttggaaagcagtgaaaatgagccaatctgagctggttccagcacacctcttggtctgttccaagaaaagaaataaagccagaagagcagaggagacaaaggagacagttgcaggagatgaggtcaaagaagcaggcaggaggctgatcttggaaggagcctagactgcattccaattataacaagaagccacgcggaaggtgttaaagcacagagtgacactccctcttcctttctaccttcttggtgtttttctcaagaggaaacaaaggcagaataaggagtagcgcaaatcctctcctcgtcttacgcatcagcagtgaacacgtccttggcgtctcacctcctacctcctgaggcatagcaacaaacaccatgacacagcaacaaacatcatggcacatcattttccagtttttctcaatagtgagcactcaattgtttttgagagcaggtaagtaaattcattctcttaagactatacagaaaagtaactgttaagtaaaattgttttaaaatggcctttactgtttcaaactgttaaaaatggtcacagaggtaatttaatgccttttaaaaggcaattgctgtcagccacagctggttgactgcctgcacactgaagctgctggaagagaaagacgacagccgttgtggtaataacatgctgccaagagaggtgacttcgtccatctcaggcgcagagctgaaggtggatgctggggaagggagacctgttgctgaagctgttggagagcttcttgcctctgtggcttatcccatttaatctagtgggctattggctcaggcaccagggggcctaaggaatggctataacctttcttctgagtttcaccctaaattgggcgctagagcggcagccacagaaaatgccctttccagtgtgcctcgtactttcttctcccaactgcgatctcctcaagggaaatgttaaagaaaaagttagtcagtgctacttgtaaagcatggtaggtaagactttatttaggaccattgcaataggtatgggatgcatgggcaagtaagaatttatggccaaggagaagcataagggtcagcagatggaaaattacatcggggtgagggaggttctgggtaaactgacctaacagtttcttactgaggcatggtggggggtgatcctacatcacctgggggatggcagaggatgaggagcctgatcagatatcaagggcgatcagatattgatggtggtgggtgctaccctgacttagcagggatctttgctaaaactagatcttacaaggcagtgcatgagtgagcccagcagaatattcagaagccggactaaactggcacagcaaagaatctttgtcagaggagccacatatgatttattcctataccccccacagtgcccaatgcgtgcttggtcaataatggattttcattaaatgtccatccaccagcaagcaaatttcactggatattccatatgtgcctggcactagattaattgacagggacttggagataaacaagataccacaccaccatcaaatgaacagcaacagtcagaagacagagaaatgagggggcacacagagagaaatagaggcagagagagctagaggtaaaggaaataatacaccctaagggttctacaaaggatctaacagggttaacaggtttataaagacatcaacaatcagagaaagagagccaaagagatctatagaaacagtgggtgctgaaatatcagttaattaaaaggttatggccatggcaaggaaatagtaatggctgctttaaatttttccaggtaacactgtcttggctgtgcctaatagtatagaaattcagcagggctgggcacggtggcttatgcctgtaatcccagcactttgggaggctgaggcaggcagatcatgaggtcaggagattgagaccatcctggccaacatggtgaaaccgcatctctactaaaaatacaaaaattagctgggcatggtggtgcgcacctgtagtcccagctactctggaggctgaggcaggagaatcgcttgaacctggaaggcagaggttgcagtgagccaagatcgcgccactgcgctccagtctggtgacagagcaagactccatctcaaaaaaaatcagaaattcagcagcctaaatcacgtgtgggagcaatcccagaatggttttctgatgagtgttcagggtggctgtcaccctgtacagactctgaggacccaaagtgccatcagcccgcatgtgatgtgagtagggatgtacggggatcaggtgctaaatggagtcctggctcaaatatgtctcacagtggagtgggtccccatggcagtcattgctccagctcttgaatttatcattggaatggccaaacaatggctgcagaacccaagaatttgtttcttgacttacggaataaaagctatcacaataggaacaaccaaatggaagcctctgaagatgccccttatcctttaatcctgacctgaagaataaatcaaacacaccacatcctaaggagagtgaagacaggtgccacttccaaagacataagggatgcaggagcaatggtctccgtttaactcacaagtctaacctcttcaaaaataagataggccatagaagacaacagcaaactactacacatttgagcaagtagtacccctactcacagctacgctgggtgtttgtttttactagaacatatgaatgcatacacatgtggaatgcagctactgatttggcatatgcattattttaatacccaccacaaaagagattcagaaacagttagcattcttatggatggacaacagtagacatttacaggctgttaaccctgctctccattataatataaccagaagggacagtccaaagaacttcacactggtgcactatgttgatgacatcatgttaatcagacctatggacaagaagagcaaatattctatatgtttcattaagaaacacactagaaggtgggagagcaacctgcaaaaccttagggtcctgccattttggtgaagctgccttttgggaccagtagtctggggttttctcaaacatcacttaaaaagtaaaggacaagttattgcttagcggtagcaccttctaccattaagaacaaagcacattaactggaggtctctacaggttttagagtaacacaaaccacgcctggcaatactctgacccatttattaggtgacatggaaactattagttttgagtgggcccagagcagtaaaggccctgcagaaggtttagactgcagtggaaatagctctgcttggactataacctggaagaatccatgcgaccaaaggcatttgtgttaggaaaagtgtgtagtagatgagttgcagtgcagacccttgtagttccagaaaaaggctgtgccatccacagcaaagaactatgggccactcaaagcgaactcctgacatcctgctgggccctggcggaatgagtgtctgaccatgggacatcaagagcttcagggaagagctatgtagatggacacatgagggtgggcatggagtgtgaggatcttagtgttgtaagttaaccctcactagaaagcatccactgctgtgacaaggaaccaagtggatagaatgatccagctagtagatgtcagccagcctctggccctggctactgctgctcttgtgaagtgggttcatgagtgacacagtagtggaggcagagatggtggcaaagaatgaggctaacatgacccaacatcatggggtccctctccccaaggctgattcagccacagctactgattggtgtctaactacagccacagaaggtgggtgtctcactaaccagtcacttgcaggcaagttgattatattgaacctcttctacactgaagggactgtgagtcatcttcactagaaatggcatatatctatgaatatgggtttgttttttctgtccacaggccctcagccagtcctgcaatcctagggctcctagagtgtctgtagatctactctatgcattctgtgacaggattccacatagcatcacctcagaccaaagggtccactttacagcaagaaaaacatagaggcgggcacacagccatggcatccactggtcctaccatgtgccacaccacacaggaactgctgggggataagcaatgggatagcctattgaagacatagctgaagaaccagcttagagatgacactctgcaaagagagtggcaccctttaaaatgtggtatacactttgaacaaagggccattatatgatgctcggtccccaagaggcagaatgcttgggtcaggagagtggaggctagccactgaaaccaatggaagtgccagcctcaccaagagacagggagattctgaaagcctgatggagaaggtggatgatgagtatgaggcatggcttcaggagtggcaacagtggagggctatggtttgtccctatttctcttcttatgagtttccccagaaatggtgatcaaccagaagcctggagaagctgtgtgccaaggaggagtacttgaaatatatatacgctggtgattctgatctccaaggataaagttaaaattcccaagaacttttataaaagtaaaagttcaggttaccttaaaaagaataaaaatctgactgccatcaaactgctcatttgcaacatggtattctggaaataataaaactttgtcttccaactttttatggaaaattatttttactgattgattgattgagacagggtctccctctgttgcccaggctgccatgcagtggtgcaatcacagctcattacagcctttacctctcaggttcaagtggtcctcccacctcagcctcttgagtagctgggaccacaggtgcacagcactacacctggctcatttttttttgttttgtagagatgaaaatttttatgttgcccaggcttatctcaaacttggattcaagcaatccgtcctcctcagcctcccaaagtactgagattataggcatgagctactgtacctggctgggaaattatttttagcccagaattctatatccaatatcaagaataaggttaaaaataaacatattaaactcataaaaatatcataaattcaccttctatgggaaaataaattactgaaggatgttctctgcccctcaagttctgggacctcagcaaaagcagcaggaaaaggctggcatcatcgggacacaccttccctcaggtgtctgtggctcctaccagcccaggctggggcttctgcagggctgtcagccacaacctctactgtgggccctccatgtgacccctccacataagctagtttgattccatgggtgagcatcccaagataacaagcatataggcatggcctttcacggtctgggctcagaggtcacatagcatcacgtctgctgcactctgctgatcaaggcagtcaccaagacccagccagggtcagggagagaacatggtgtagctgtaaaagcatgggggttggcagacattgttgcagtcatttttagaaaatatgacctgccacggcagtgagcaagggcaccagtgacatccatggtcaaatccaagtaactctcagtggtgtgactgtgagacataatgcaattgacaagaatgagaatttttaaagctttggcctatataaaaaattaaaaaatgaatgaaatatagaactaagattccaggttatttcaaaataatgtggatgttaggagtagaggtggaaaggagagtataatgtgtgctaagtgtcttgttcatttgaagtagttacaggtagaaattaattctggactttaaattatgactatattcacatggattagtaaaatgtttaaaactcttgtataatactttggcattaaaaataataactttaaggccaaccattagaagactagacataagatgtaatttctaaaacagtaaaataatggaagtgacaaaaaacaataaaacaagaagaagatattttaaggccaaaacatgaaataagatggtagtaattatgtaaacacatcattagtcacaaatgtgaatttaatctcctttttaaagagagaaatttttaaattggaatgttttaaattcagctgtatgttatttacaaaaaagcatgcctaaatttggaaaaaaaaaaaaaaagagagagaggaaaatttgaaaataaaaaaataaatgaagatataccagggaaatgctaactaaaagaaagcagaaatgtcaatagcaatagtagtcaaaatggacttcaaagtgagaggcattaaatgcattaaataggaatgagacatatttatattataaaaattacagttgcctccaaaatataacaatcattaacctttatgaacagagcaatattatattggtatttatagagttaaaactcctggaaacataagagaaactgacaaaccacaatcttggcgagagattttaaaacctctccaagaaattaagataccaactagatgaaaaaaaattaagccatagaggacataaatagttattgtactttcatataaacttccagtttctaatttaattaactatatagttgcattgctaatatgaattgttctcagtaaaaaggctgcacaatgttttcaaatacctgttggattttttttgtttgtttgtttatttaccaaaccagggtatttagcatatacattacctcctacagttattatttatttgttgtgagaacattcagaattgtctcttcttgcctttttagagtatacaacagagaaatgttaaccacagtcaccctcctgtgtaatagaacgccagaacttattcctcctatctaactgtaacttcgtactcactgaccaacctctccctgtttccagtggaacaacctttaactacccttttattagtcaaaataaataaataaataagttgccaaaagtcaaaaatcacacaggtcacattcagtgatccaataaaaataagtttcgcaaacacctcgtttcgaaattaaagcaactctaaatatatcttagtttaatgtgaatatcaaaactgaaattacatctcttgcctgagacctaaaatagtaaaacacatggaagaacacagcaggatggtggctaccatggcattgaaggaatgtgatgtggggagttgttgttcaacaaggataaaatcaggtttttttgttttgttttgctttgttttgagacagagtcttgttctgtcccccaggctggagtgcagtggcatgatcttggctcactgcaacctctgctttccgggttcaagcgattctcctgcctcagcctcctgagttgctgggattacagacacatgccaccatgcccggctaatatttgtatttttagtagagatgggcttctgccatgttggccaggctggctcctgacctcaggtgaccctcccacctcggcctcccaaagtgctgggattacaggtgtgagccactgcacccagccaagatcagttttaagatgagtaagctccagagatctgctatacaatgcagcccctgtggttaaaaataatttaaagggtagatttcatattaagcgttcttaccacaaaagtgggtggaaacacaaggcaactctgagaagtgatggagatgtttattaccttgactgtggtgagggtagcatgatatagacacatgtccaaactcactgaagtgtatgcattaattatgtgcagttttttgatacaccaattatacctcaataaagctgggacaaaaaatttgcttacactaaaattacaaagtaaatagaaataaatgtcagtgagagtactaaaggtagttactttttttggtcacttttattcttttagtattttagaaattacatcttatgtctagtcttctaatggttggccttaaaattatttctttaaatgacgaagtatatggatgtcaccaaagccatatttgatgccaattttggtcacatttgcatttattagcacacatgaaagaccaaaaatagaataagaattatactcaagaaggtaaatgtaaatacatccttaaaaagtagaaatttaataaaaatacagcagaaatcagaaaattcttttaaatgaatactaactcataaccaaatgtgtcatcctgagaatgtaagaacatggcaacattaggaaatttatgcaaaaaaaaatacactatatagaaaaggggatgccacgtggtcagctcaagaggcagaaacacattctgttccccccctcccccaatattttattatccaggaaaaaatttaaactttcttaacttgataaaaggtagctttcaaaacctacaataaataacatacttagagtggcagcattagaaatctattaaacccaatatacagtaactatcatcttaactatccagcattattccagaggtcctggaaaactccagaaaatgaaaacaagaaattctattaatattcaaaaggaaggcaggctgggcgcggtggctcatgcctgtaattctagcattttgggaggctgaggcaggcggatcacttgcggtcaggagtttgagaccagcctggccaacatggtgaaacctcatttctactaaaaaaaaaatacaaaaaaacttagccgggcatggtggcacgcacctgtaatcccagctactcaggaggctgaggcaggagaattgcttgaacccgagaggtggaggttgcagtgagccaagattgtcccactgcactccagcctgggtgacagagcgagacgctgtctcaaaaaaaaaaaaaaaaaaaaaaagaaaaaaaatatgtattcaataggaagaaataaaacctaatctactgattataaacatgattgtttatacaaaaaataatcagctaaaaattgttagaatctatgagtttagtaaggtggccaaataaaacaacattcccaaaccaataggtttcctgcacaccagtagtaatcaattagaaaaagttgaatttcagtatttatagttttctaggaattagtctatttcttctaagttgtagacattatgaatatagcatcatccttttcatgactgaaggatctgtagagatatttcctgctttatctggacattggtgatctgtgtctttttttctattgtgtcagccttgaaaaagataaaaagaaattgaccaggagatttgtcaattttactgattttttttaaaaagaactgccttttaaattttattgatgttctctcattgttcacctgttttcaattttataattgaaaacatctttaaaaagcagaaatgtatggtatctttctcatttctatctgtttgctttgagtttacgttgttcttctttttctaggtttttcgtggaaagcctctgaaacgtctacctggagctctctgtgtagttgtatggatacctccccaggtgtgcctctctgagaggacaggtctgccttgagctataaacatggcatttgtcggccaggcgcagtggctcaagcctgtaatcccagcactttgggaggccaaggcgggtggatcacaaggtcagcagtttgagaccagcctgaccaacatggtgaaaccccatctctactaaaaatacaaaaaaattagctgggcgtggtggcgggcacctgtagtcccagctactcgggaggctgaggcaggaagaatggcgtgaaccccagaggtggagcttgcagtgagctgagattgcaccaccgcactccagcctgggcaacagagcgagactccgtctcagagaaaaaaaaaaaaaaggaaaaacaaccctggcatttgtcagcatgcatgctgttgaaagctgtgggattagatgaggtgataaggtgcaattgtgtaggcagggcccaggacaaagctgcagtgttttaaggtctggagaagaaaatccagcaaaggggactgagggatggcaggagcgaggaggaagagaatcagtcagaaataatgtcactttgggaggcaaggcgggcagatcacctgaagtcaggagtttgagaccagcctcgccaacatgatgaaaccccatctctactaaaaatacaaaaattagccaggtgtggtggcaggtgcctataatcccagctactcgtgaggctgaggtgggagaatcacttgaacctgggaggcggaggttgcagcgagccaagtttgcaccattgcactccagcctgggcgacagagtgagactccatctcaaaaaaagagaggaaaaaaaaaggtcaaaagagcagcacttttcagaaggaaaacatggacaactgtgccatgctgatgagagatcaaacaagatgaagtcctaaatggttcactggaagcagcaacgtggaagcccctggtgactttgacatgagcagtttcactggagtgtggcagacagaatctgactgaggagctgggggtcagggcgggagggggtgctcagcaggcaagggtgtcacatttgttaatgaagacggtgtcacatttgttaatgaagatgttctctcctttgaatgagatgatgcatttagtgtgtaacagtgtccggctcacagtcgggccttgctaacactttgctttcactcacttccttatctttcattcactgaccagaaaggttaatggtggctgttcctcttttgaaaagcggattgggaacaccagcatagctattttgacactgggatttctgttagaaaagtagatgtgacttattccctttgggtggaactccttttctagaaagggaggcaacacacatgttgggtaaatctcagtttctagagtcaggctgccataagttaaatctcagttccgcccccgagacatgtagctatggggattttacatgaactcccgagtctcagttttctcaccatcaaccattcatcagaatagtgcctacctcaccaatgcacaccttaagcacctggcgcctctgttagctaccatttaagttgagaatttccctgtgaggttttttcagaggaggttccttctacaataaaccaccaagtacttggtccccttttgcagaaatccatccacaccatgtgtaaacacaggggctgggaacttgcatggtaaaccaggtcagccaaacacggattaacaatgccaggcccatttcacctgcaaagtatcagcgactcttcaatcggcaggtccccagctgccttgcagcacagccagggcctagcatagcgctgcctccttccctttcacttgtcctcaggaatccccggagatccagggtgaggctcctttagtctaatgagaaggaggcattctgactttttaggttattttctcttcccagcccctggcagatggaaaaagaaaacaaaacaaaacaaaacaaaaaaacaaacaaaaaaaaccccgccacaataattgctgcttgcatgaatgacctcaatacgggaagagtgctgagcgcctaagtccttgcactgctgccaggcctggcgtcatcatgattaacacagcaatcaccggccagggagccgggccgctctgcctaccagacaccctgactgggtgacttacggctttatatttttaaattggcctctctagcaccgtctgataaatcaacacacaagtcattaaatggttcattatcccagtaatatgattcattctttgtgccaagaaatgcaggagatgtcaggaaacttaaaaatatctcatttgaagccatgagtgcccatctacataacagattaactggatgagagagagtggttggacatggaggtcaaagagaagactcagcaggtggtggtcttacctgcagcagtcctttacctcctgctgaaaaatgtaagtcacactctcactaggcaggctctgtgctggccacactttctccctcataggctcagaaggcggtcatgctggctgcaggcacctgctagagaattcacagccgagggcactcagctagggtcattcctataggaagaacaccaagtccagaagatgacggggccatgtgctatggaagaaagagcactcggtcccagttctgccaccaggtctgaaactctgggtacattgcttgaaatgaaatcacaatactttgttgtcatcatctgtcaaacaagaaagtcattctccacattttttcaagttctttctagctctaagattctatgactctagtgtgttggaggagaagagaggaaggcagagttgagagcttggtcagagctgagttccaatgtatctgatatgtggattatgtaggagactcttccaccaaatctacatacactattttgcatgaaggttgctaatttatgttgattgtgtcagtgatggctcctttagtagaaagaagaaaaaaaatctaaatgaaactggcttaagcactaaggacatttatttgtttgtgtattctgcaacctctgaatgtttgctttggtctccattacaacacctgggactagaagagtccctagactcatggaacttaattctagttggggaaatagataataaacaaaacatatgtaactatattatctaatgtcaggtaatgacaaatgcaatgaagacaaacaaacaggacaggtgaatagagagatccttttttacacagaatggtgatggaaggtctctttaaggcaattaatagctgatacaatgttggtaaataaaggtatgacaagaagactatgagaccttcagagaagattcctgccaggaagcacgactaccaagagcacagatatgtggttaagcataccaggcgaacccagtgaactagatttctgtggaggatggaaggaaccagcatggtccaccctgttggggagctcagaatggagctgacagtgttggctgagaagtttggaagggttcctatgacagggccacatgttgctgtaaccaagagctcagcatctgccaaggactcaagtgaatcttcaggcagatttctacagcccccacttgctcagctccctcttctccagtggcctccctcacaaactccaacagtccacaaccctgatctctaaatactcggcttagtgagatcaatgcttttgttgagtttctacctctctgcatttcagaaaaaaaccccaaaaaaacaaacaaaaaaaacggcccaagaaagaaagctgggaccccctttttagaggcacgtgaaccagaacaactccatcttgaataggagctgggtaaaataaggctgaaacctactgggcttcattcccagatggttacggcattctaagtcacaggatgagataagaggtcggcacaagatacaggtaataaagaccttgctgataaaacaggtttcagtaaggaagccggctaaatcctcccaaaaccaagatggccacaagagtgactctggccatcctcactgctacactcccaccagcaacatgacagtttacaaataccatggcaacgttgggaagttaccttatatggtctaaaaaggggatgcaggaataatccaccccttctttagcatatcatcaagaaataaccataaacatgggcaaccagcagccctcagggctgctctgtctatggagtagccattcttttattgctttactttcttaataaacttgctttcactttgcactgcagactcaacctaaattctttcttgcgtgagatccaagaaccctctcttggggtctggattgggacccgtttcctgtaacatatttctccgtcctgcaacatatttctggccaccatgaacgtatgatactgagaaaacccccccgacttggaggaaatggactgcggcactgattggatgacttcgggtaagtgggtggggcacccaagtaaagaatgggattgggttagaggcccaacttaggggagttagtctctcctaagacagagtgggttagaagcccctcttaataaaaggcagaatgcttgacggaccttgggttagaggcccaacttaggagggttagagtcccttctaagatgtatggggttagaggcccctctcagtaaagtccctcttggctaaaaccaggtttggcaccgcaggttatgctctttgtattaatctgcctcgtactgtttgctgacggctgtgtgtgggtgacagggttaggcatgtacaggattgtgggacatggggagctttttcctccctaaaaggggaaacttgagcactaataggattgctggaaaagatccattggctactgacaagcagccgcctgaacttttcagtgtcgctgcaatgggtgggtctttctctggcctccccaagcatttctcgccttccccaccctgccccaggcaatgcttttctctctctcctttccctttcccatctgttctgttactcagggtgaccatcttgcccagagaccacgtgttgaaactccaatttggaggctggattaaaggtgacggggtccacccatctgggggcaaatttaagccctgccagtttgacattgcatgctaagcagagtggctaatgtctatgttttatcacatgtattttgctctggccagaacgaaaacaataattttcctttatgatgcagcttggcccccagggcgatggtgccgcaagctggattactaggggcgctcagggaaagggaatccagaagcctggcacgccagcaaaagggcaagaatttcttaccagtcagatttctggcttctctctgtgcaaacagttgatgtatggaaaaaaaacaaaatcagtatttatctcctctgtaaagttttgattaatgcgaaaaagaattctaaggctagtcttaacctagtgtgtttggtgctatgaatttgtttttctgtgtcaaggggtacttcaggataaaacacaggcttagaacacctgtcagtccgcttttcaagatgacccagcagctggtcataacaaacttggctgcaggtccctgaaacaaacaaacagacaaaaaaactggatgaagtctccaccttgttttatgtccttgggagcttgacgttttaatcacgtggtgataccttttcttggtctcttccttgtcccttccagggacaggaattttagggttcatgtaatagctctaaaaaatcatactgaataaaatcatattaaataaaagtctttgcaaactcaaaattaactactctagactccttctgggaaagaaaatggagactgccccttgctgtagctcagtagctagggttttgcactttcgcagtggtggtccgggttcaatttttcatgtaggaagttatttctggtttagtatctgtgtgaccttgtctattctcttgtgcttcgcagactgtcttaaattttcctttctctaaggacatgggaggttacctgtggtaaagttcaaaagctagaaatatcagctatttggcattagaaattttaaaaggacattattaaagagtgctacggttaaaatcaatttaattaaaagcagatagattcctctcaaaatcaaaggctattttgttttgcattgttatcgacagttttgagttttgggggtatcagaaattactttacattatgagagagctttggtgtgtaataactatgtaggaaatatactttaagggatggctaatagtagttatggaaggatacttgactctttgcacacttggatcagagaagcatgctcttggccacctgaaagatgattaaacatccccaccccacactgggggacgagactcccataagggatagtctaattacaaaataggctgattggctttgggttgccttgcaatgaaatgcaggagagaagcactgcattgtcttctcccgaaatatttccctccttttggggatccaggaaccggtataaaatgacactcttaatttgggggatctgtctttgccttcagctgcttatttggccctagaaatgcatgctttcctggccctgttcctccaagggctccaccctgaagccagtaatccagttaagaaaggtggttcacacctgtaatcctagtactttgggaggcccaggcaggttgatcacgaggtcaggagttcgagatcagactggccaatatgcttaaacctgtctctactaaaaatacaaaatttagccgggcatggtggtgggtgtctgtaatcccagctactcaggaggctgaggcaggagaatcacttgaacctgggaggcggaggttgcagtgtgatgagattgccccattgcaccacagcctgggcaatagcgtgagactccatctcaaaaaaagaaggaaggaaggaaggaaggaaggaaggaaggaaggaaggaaagaaggaaggatggaagggagaaaatggcaaatgaaaaatcttacaagtgctgaatcttctgtctgtggatttatatatgttgcatgtttatagataaaagagctctaattaactggcttagaaaaataggcacttaaatattttgtcagaaaaacaggaactttaatgcctttttgttcatgtgactttagtaatcttttggaaataatgacagttctaaaaattattagtaaaataaaatgtctttaaaaatgtagacatttggtctaaattaacgtcaaatatcagatttgctaaatgctttaaggtcaaattgtttttctgacttttgaaaattgttcaatttggctgggcccagtggctcacgcctgtaatcccagcactttgggaggctgaggcaggtggatcatctgaggtcaggagttcgagaccagcctgaccaacatggtgaaaccctgtctctactaagaatacaaaaattagctgggcctggtggcaggtgcctgtaatctcagctacttgggaggctgaggcaggagaatcgcttgaacccgggaggtggaggttgtggtgagtggagattgcaccattgcatttcagcctgggtgacagagcaaggttccaactcaaaaaaaatataaataaataaataaaagaaaaaagaaaaatgttcaatttacctactttaaagtcattagcttctagataagggctgggacatgtggaattagccatactccctagctatacaaacaagattataaagaaagagattttacataagaagggatctcacatggtaaattcttgtcctaaagtaaaataactggttgtttaaaaggagggatgtttaaggcaagtcagaaagtccaagaatgactcagatggtctgtgtaagtcgtgaaaggaactgtgaaagggaatttatgcaagaaatgtacaatccaaaggttcttaggcctcctaaatccttcataaaatgccactatgactcttacttaagtaagagtaaggcctggggacatttggaattagccacactccctagctgtgctagagagtcagctcttatctgcacttttgcctggtgtgtcctaggcaggctacacactagtacacaattaaaatctcgaatttaccaaggttttcaccaaaaataaaagttgctaagagttaacattataacatgtaattaagactactgaagaaacagttttacatgcaaggtgtgtaagaaaagcaaaatgtgtttttggttaaaaaaaaaaaaagattataagaagtcatgggaatgtggttttttttctgcctaaaatgttaaaggattgttttaagtaagaaaaaaaaatttttttaaactagttgtggaaggtttataaaaattaattgtaagagattctgtgtttgaacatattggctaaagttaaaggaatattattcactaaacattggaataaaagcacaatgggtttttctgctctttcacaaaaaatgtaaagagttataaaaggtttataagaatctttccttatggttaaacattaaaattgggtaaatatgtctataaggttttatataaaaattggatttaacattaatagtacattaaaataaaggtaaaatttggcttaattgatgtaaaattcatacaggaagcattatcaaatgtaaaatggtgtttttctttctttagatatttgcataaatgtgttattggcatatgttccaaagttatggaaaacttctataattctaatataacttagtgtatgttattaataattataattgttatgtaaaattctgtgtaccacataggtaaccaaatttcctgatcaattatggctttaatggtggctgtcctcaaactttttatcatccacaggcaattgctgtcttgttttaatcccctttaaaagatggtttgtaatcaactataaaaccctggcaggtgttaaatacaagtttttctaataactttggaaattgtaatattaaaataaagaaaacaacattcaaaactctcataaaaagctaaaatgtttacaaatatcaaatacaacagaaattaacagaaccaataggaaactgaagtaatcttttcaactttgcttaaaacactgctaatcctttgttttgtttttcagagtcaaaaaaaaaacttttttaagctatttacagcttataacaattgagtaaagtatactgctgtgaaaaaaaaatggaaacatatttttctctacctaatttttccaaaatttaggaactagttgtaagtatgcttaacttatggcaatataattatttgtataagtgcaataaaaatctgttttcttttgtaacaagacacaattgaagaaactggtcattttaccaaggctttaactggaatggtgtgttttcccttaagaaattaaacttaacttgtagagccaataaaagcctcatgggaaactggcctcataccttgcctacaacagtgcctgtacagggtttctgacctgtggtaagtaaagaatgccactttctaacaggtccagaagccacaagttatcttgggacctcaagaggaaagaaatttaccaaactcataggtatttgatggtacaaacccatggataagcttggccttaaaagccttatctaaaattccttctatggaacagaattccatcaaagccaatttaaaaagaacctatgtgaaaaataattattcttgctgcactttatacaaataatcaggccaagtataataaagcaaattggtcttaccataatttgcatttagcaaaaatgggaaactggagagagaaatattttgtttcaaaaactatggtatacttgttattaaattctagtctcatcagtcattttgaagtttgtttctgcaataagcaggctaactcttcttcttccggtgaaccaaccagtgatgtctgactgttgctcagaagaaacaagagggatgggcaatgtaaaaatctggattagtattctaattctgggcacattacaatcagctagcaaccccataccagcttagttccaacagttgcccaattcatgaaaagccttctaatttagtttacttggaataactttacttattttgcttcactcttgtggaatatattgctgttatactctgtgtaggaatataaaaaaagcttactaaatgttttcttaaacacttattaatcttccagatatcacctcttgtcaaaactcaagagtcataaatggccctcaccatactgatgttttctaactgagctcctctctaccctgaacacaatagaccctaacaggcagaaatatcatcacccctattcagcctgaagaagttacagaaaatgaatcttcatacctctgcgacccttaggattaagggttctcttataaaagggaagggggaaatgtcagaggtttgtgaaccagaacaactccatcttgaataggagctgggtaaaatgagactgaaacctactgggctgcattcccagatggttaaggcattctaagtcacaggatgagacaggaggtcggcacaaagtacaggtcataaagaccttgcctataaaacagattgcagtaaagaagacggctaaatcctaccaaaaccaagatggccacaagagtgacctctggtcgtcctcactactacactcccatcagcgctaagacagcttacaaatgccatggcaacatcaggaagttaccctatgtggtctaaaaagggaaggcatgaataatccaccccttatttagcataccatcaagaaataaccataaaaatgggcagctagcagccctcagggctgctctgtctatgtactcgtaacccattcttttattccttcactttcttaataaacctgctttcactctgcactgcggacttgccctaaattctttcttgtgcgagatccaagaaccctctcttggggtctggattgggagtcctttcctgtatatctctgttctgtaacaccttgaggctcattttgtgtgtttcctttctctcaacaatcacagttctgcactgtgtaatgttcagtgtctgaaaacacctgcttcatgtttgtctaatttaatagtagttttctgtgggaatgaaagtctagtactagttacactgtcatggccaaaactgagggccttttgggtgtcttctaatacccttgattcttattggcagctgcctactctgagtaaatgcccaacaaaatacgaaacagctcagcttcatgtcttccaaccaacctcagaaaaaagataaagtctgatttaaatttcatatcaaaagcaatatttcaactatttaaagctacaataaatatacaaccatacggaaatctgtaaccaaatataaaaccctctaaactaaaacatttaacacagcagagaccaccaatgtaacactgggttaattcatttttgtgtaaaacctgtaataaagtgtaccaccacatttatgtttaatttaagagcctctttactccagaagtataaggggcccaaatcagaaaacctattgatataatttaccacattaacaaaccaggaaattatatggttatttcaataggaaaagaaacagtattcaataaaattcaatctatacacataataaaacatatattacaataagaaaagtaaaaatgaaaagcttaatgaaagatatttaatttaaaagccacagaaaacatcatatgtaacagtgaaatttaaaaatcattctcattaaagtcatgctcaacactaaggtgtcaagtgtctctgcttgtattcaacatgtcattcaccattttttttttccctgtggtatctcttgacctggtctcaaggcagccagaactccagaaacacaataagcattgataaaaagatctcgaagagaagccctctagttcaggctcaagaagaggaaaaggggtctcctgttaatacaagttgtggcagccagaacccacagcgctgggaactcaaagaaagaagagccttcctcttcagtgaaaagagctactgtccaaagggggtgaggcaagttcctgttgatttttcctctctgccccctactctctccagatacacactggttggccttggatatagacatagttccagaaagaaagtgcaaaagcaaagtaaataaaacttcaggtttttggctagaggactaaaaaaggagaatcccagtaccaagactgcagaaaaggaggagcttgggaaacaataccattaaggtgtttatgaactcctgaaatcaacctcaagtttagcattcaggttctgattcaaagcagcctacaaagacattgagaactaaactaagagaccatgacccatgtcccagattgaccaccagagggtacacatgtaggacaaatttaaataggactgcaaaggctgttaaaagtaaactaatatagagactttatcccagagaaggccactcagaatttacaatctaagcccaatcaggtcaattggctgctaaaacaaaaatgtcaatattctccacagggtatatacaagacccagtcctgtagtacacaatattgaaaatgtccagaatataataccaaattacatggcacatgaagaaccaatgaaattacaaattgcatgagaaaagacaaccaacggatgacaacagtcagatattggaactcatccaacagtaaacctttccaactgatgctaaatttgtctgacaaaggctttgataattatcccactagtaagggtaaacgtatttatttttatttttaattttttgagacagagtctggctctgttgcctaggctggagtggagtgcatgatctctgctcacagcaacctctgtcttctgggctcaagccatcctctcacttcagcctcatgagtagctgggactgtagacagataccaccatgcccagctaactttggttctatgtatgtatgtatgtatgtatgtatgtatgtatgtatgtatgtatgtatctatctatctatctatctatctagtagaaatggggtttcaccacattgcctgggttggtcttaaactcctggctcaggcaatccacttgcctaggcctcccaaagtgcacggaataaaggcatgagccacagcacctggcctaagcatctttaaaataaatcaggtaatagaaagtctcagcccaaaatagagccaaacatacataaatgtatatacaatacacaaaagaaccaaatataaaatccagaactaaaacatacaatgaataaaatgttaaaactcattaggtgtactcaatagcataattgagatgacagagtgaaaagttcactggaacttgaggatagatcaatagaaatattcaaccttaaaaactaagaaaagattgattaaaaattaatctgggctgggtgcgatggctcatgcctataatccagcactttggcaggctgaggcaggaggatcacctgagttcaggagttcgagaccagcctggccaacatggtgaaacactgtctctactaaaaatacaaaaattagctgggtgtggtggtgggcacctgtaatcccagctactcaggaggctgaggaatgagaatcgcttgaacctggaaggcagaggttgcagtgagctgagattgtgccactgcattccagcctggacaacagagcaagactctgtctcaaaacaaaacaaaacaaattaatctgtgggataaaatagaaatgcctagcatttgtttcatctgagtcgtagaaagaaataataaagactgcagtggagacataatatttaaagaaataatgtatagaaactcttcaagtttgggggaaaaaataaacctacagattcaagaagctcagaaaattgcaaacagcgaaaacacaaataaatcaatgcaaagacatattacaatcaaactttgaaaataaagacaaagaaaaaatcttaaaagcagccagacaaaaaaagatgcattgcttaaaaaaggaaaacagtacacaagacagtggatttctcatcaaaaatttctgataccaaaataataataataaaaaaatttcaaccaagaattctaggtccaagaaaaatactcttcagaaatgtacatcaaaaccacaataagataccacttcacatctactaggatggctataataaaaaagagacaataacaaatgtttgcgagcaggtgaagaaattgaaacccttacacattgctcataggaatataaaatgatgcagctgctttggaaaacagtttggcagctcctaaaaaaattaaatatagagttccatatgccccaacaattctacttctaggtatagacccaagataattgaaaacacatatttacacaaaaacttatacatgaatattcatagcagcactattcataatagccaaaagatacaaacactccaactatcaatcaattgatgagtagataaatataatatgttatatccatacaatgaaatgctattctgctgtaaaaaatacttaagttctgatacatgctaatatggataaaactcaaagaaattgtgcaaagtgaaagaagccagaaagaaaccgccacatattctatgatttcagttgtaggcaatgtccagaatagacagattcatagagacagaaagattattgatggctaggggctaggtagaaaagaagaatgaactgctaatgtatacagggattttacgggtggtggtggtgatataaaggttctagctttaggtaatggtgatagttgcacaactttgagaatatgcaaaaaaaaaaaaataaaaaacaaattgtgtactttaaaaaggtacattttatggtatgtgaagtatgtttccaaaaaaaaggagaataaagaagttctcatttaaagtaaaaccaagagaattcattgtcagtggacctgctctaagagaattgctaaagtagtcactagacacaaaggaaatggtaccagaaagaaacttcagagcagaaattttaaaaaagcaaaagaaatttaaaatatacgaaaaaattgagtaaactattcttctgttgaattctttaaaatatgttatgtttcaaagtaaaacaatatttttaaatgaaatttcaaagtatgtagatgcaatacgtaataaacatataggccgggcgcggtggctcacgcctgtaatcccagcactttgggaggccgaggtgggcggatcatgaggtcaggagatcgagaccatcctggctaacacggtgaaaccccatctctactgaaaatacaaaaaattagccgggcgtggtggtgggcacctgtagtcccagctactcgggaggctgaggcaggagaatggcgtgaacccgggaggtggagcttgcagcgagccgagatggcaccgctgcactccagcctgggtgacagagtgagactccgtttcaaaaaaaaaaaaaaaaatcatataagaaattacaacataaagggggaagaaggaacctatagagaggtaagatttcaaaacacatgatacagtaaaatactgattctgtgtagatagtgaacatttaaatgaaaatattgtaattactagggctaccactttttttaatttaaaaaaagtacgtacacaatgagatgtattcaaaaacacaagatatagaattgaattaaaaattattaaataagccgggcacagtggctcgcacctgtaatcccagcactttggaaggcagaggcgggctgaggtcaagaactcaagaccagcctggccaacatggtgaaaccccgtctctactaaaaatacaaaaattagctgggcgtgttggcgcccacctgtagtgccagctactcaggaagctgaggcaggagaatcgcttgagccagggagacggaggttgcagtgagccaagattgcaccactgcactccagcctggccgacagagcaagactctgtctaaaaaaaaaaaaaaaaattattaaataacccaaaagaaggcaggaatgggaacacacagggatgataaacagaggaacaaggagatacaaagaataaaatgatagaactacattcaaacacatcaacaattacattacaggtaaatgatctaaatgcaccaaataaagagattgtcagaacaagtttttaaaaatacataatccaattatatactctctataaaaattctgcttcaagcataaagatatcagtacattaaaattaggagaaaagatacaaaatgcaaacactaaccaaaagaaagctcaagtggttatattaatatcagacaaagtagacttcagagcaaacaaatttagcaggatatcatacaataataaaagagttcatttataagaattacataaaaaccctaaatgtatatggaagctaaaaacaaaccttcaaaatataaaaactgaaaattaatttttggacaaattggactacatcaaaattaaaaactttaactctgaaacaacactgctaagagagtaaaaagaaaggctacagattgggagaaaatatgcgcaaatcacatatccaacataagacttgcattcagaatctaaaaggaaattttttaattcaacaataagtaagcaaacaaccaaattaaaaaatgggcaaaagaggtgaacagacactttaccaaacagtatttaaggagagcaaatgagcacatgaaaagatatttaacatcgttagtcattatgaaaatgcaaattaaaaccttgttgaaatgcaattacacacataaataaaaataacgacaatgtcaagtgagagtgaccatgcagaacagttggaactgcaaacattgctgtgggaatgcaaaatggttcagccactctgggaaacagcaagtttcttataaagtgaaacacacacttaccatatgacagaacgtcaattctactcctgagtacttagagaaatataaatttatgttcattctaaaactggtacaggaatgttgatagaggctctgtttataattgcccactggaaacaacccagatgttcttcaagggatgaatggttacataaatgagccaaagatggcctctgtgttttggcccctatgtttattgtaggttgagaccagttagctcaaaatcctgcccaaaccaaactcaaatttgtacataccgagttatttataaaattgcctgaacaagcaaatttttagctatttagagctttcctgctttgcatactccaagaaacctcacccaacagctgttacctactgataaatagggccttgcagttataaaacccaaaattcctgctgcctttggtttgcctgacccaagacttcctgctgtgctgctgtgagacacccttgagatacatacataagccccatattcaaccctccctccagagttctcttgccttattccctttctcattggtggtctcattagactgtctcatgcaaccctgtcttactgccactcaataaagttgtgtgttactgcctctcattgtcatatgtttttcctagctcagtccccaaatccctaaaacccttaggtgaatacataagcaaactttagtacatccacacaatgaaacactacttagcactaaaaagcaacaaactattgatacacgtagcaatctgaatgctcagtaaatgaggccagaatcaaagttgatactacagatttcatttatataacagtttccaaaagactacagtgatagaaaacagataactgattgtcagggattcggaatggaggtgagtgtgacttacaatggaacagaatcaggaaagttttggggatgatagaactattctgaattctgactatggtggtgtttacacatgtgttaatatgcatgtatctgtataccaatataccaaaagggccaatcatgcatattaacaacatacatatgttaatataacagttaatataacagtatatatataacagtattactataacagttaatataacagtaacaacatacgtgtgttaatatgcatgcatctgtataccaataccaaaagggccaattctactgtatgctaattttgttttgttttttttttgagatagagtctctctctgtcgcccaggctgggaatttataaaattgactgattaaaccagaaagaataacattgtattatatcatttattatgtggatagataacaaaatatatacaatgatagcataaaggactgtaagaggagagtagttttactgttagaagtttcttgcattgtataagtagtggcacagtatgtactctaagtagactatggtaagtatatgtgtatataaatacttagaaaaatctctaaaatatacaatgaagttaagctaaatatcagtggataaattaaaatgaaacactaaaaatatctgattaatccatgtgacggcaagaaaggaagaacaaaggaaaaaaatagttgggatgactaaaaaaacaaatagcaatatgatagatatacttaaacccagccataccaataattacattaaatgtaaatgtactaaacattcctattaagatgcagtaatagtcacactagatattaaaagcaatatccaaccatatgctacctataagaggcatactttatatataaaactgcagattgtttgagagtactaagatgcaaataaatattccacacaaagagcaagcctaagaaaaacaactatttgtttgaataacattattagccaattttactgggttaacaataaacattgcatccatacactataaatatgtaacttgtttatgtgcacatgaaacatatattttagatacaatatgctgggacacaaaataagtctcaatgtttttaaaggattgagatcttacatagtaggttctctgaccacaacagaattaaattagaaatcaataaaaataacatgcctggaattatgcaaaatatttagaaattaaacaactactacctaatgcataggtcaaaaaaaaaatctcaaaggaaattgtcaagaaccatgaagggtctgagttcgtattctgtttgcaagctaacaagtttgcctgccacaatttcacagatggtggcagaggacacaaaactcctgagtcagaggtaaagaaattaattgtccatagcacagcaagcagcatgagtttcgtatttacccaagtccctcttacccctccagtcccagtgagagatgtggagctgcccagataaatgctatacacacagtagttttgtatcacatttaaagaaccctaagctaggaaattcagtaggcaaatctgtccaacattttctccagagggagatattatctttattacgttaggcagcaaacaagtcttctctctactccagagaagtgctgtctctattttctaatgatatttgttattcaacctccttgaaatgtagcctaaaactaaagttgccagtgccaatatgtgtaagacaaagaagaattctgtctaaatggaaataataaaatattttgaactgaatgctaaaaaattaggcatataaaaatctgtgagatgcaggtaaagcagttttttgaggaaaatgtatagctttaaatgtttaaaagcaaagtagacttaaaaacaattatctaagcttccactttaaaaagctagagaaagaaaagcaaagtatgcccaaaataagtagaacacttttttaatattttacctgaagtgatatacatttagaaaaaaatagtacgttgaaggacgaaaataataaaaatatggcaaaaatcaataaatagaaaacaagcagtaaagtcaataaaactaagagctggatcttttcaaagatgaataaaattgataaacccaagtgaaacaaataaagaaaaagagagagaaaacacaaataccaacattgtcagtgaaagaaggggatatcattaacacaacttaccaaaactaaaacaaaagagataaaaaatctaatagcccaatatctattaaagaagcagaatacattatcaaaataacttatcataaagaaaactccaggctcacattgttttattaatgaaatctatcaagcatttaaagaagaaatagtgctaatcttacccaaacactttgaaaaatagtaaaggagggaatatgttatatggaccagcataagttttgacataaaacttgacaaggtaattacaaaacaaaacaaaacaaaacaaaacaaaacaaaacaaaacaacaaaaactacagaccaatggtctctcatgactatagttaaaaaagtcttttttttcttttaaacaacaaagaagcctatttattgagggggaaaaaagagacagataggttatagatgttgttatacattatatcttataatttacattttgctttcataggtcacagaaagatgtataaaaacaccaaaagcaatggcaacaaaagccaaaattgacaaatgggatctaattaaactaaagagcttctgcacagcaaaagaaactaccatcagagtgaacaggcaacttacagaatgggagaacatttttgcaatctactcatctgacaaagggctaatatccagaatctacaatgaactcaaacaaatttacaagaaaaaaacaaacaaccccatcaaaaagtgggcgaaggatatgaacagacacttctcaaaagaagacatttatgcagccaaaaaacacaagaacaaatgctcatcatcactggccatcagagaaatgcaaatcaaaaccacaatgagataccaccatctcacaccagttagaatggcgatcattaaaaagtcaggaaacaacaggtgctggagaggatgtggagaaataggaacacttttacactgttggtgggactgtaaactagttcagccattgtggaagtcagtgtggcgattcctcagggatctagaactagaaataccatttgacccagccatcccattactgggtatatacccaaaggattataaatcatgctgctataaagacacatgcacacgtatgtttatacaggcactattcacaatagcaaagacttggaaccaacttaaatgtccaacaacgatagactggattaagaaaatgtggcacatatacaccatggaatactatgcagccataaaaatgatgagttcatgtcctttgtagggacatggatgaaactggaaatcgtcattctcaggaaactatcgcaaggacaaaaaaccaaacgccgtgtgttctcactcataggtgggaattgaacaatgagaacacatggacacaagaaggggaacatcacacactggggactgttgtggggtggggggaggggggagggatagcattaggagatatacctaatgctaaatgaccagttaatgggtgcagtacaccaacatggcacatgtatacatatgtaacaaacctgcacgttgtgcacatgtaccctaaaacttaaagtataataataataataacaaaaagagtaatctatagagcaatgaacattacagattgtgtgctgaatcaggaaagagtttgctttggactatagttaaaaaagtcttaagcaaaatattagaaaataaaatctagtgatattttaaaaagtataatgaccaactatgattactccagaaatacaagattggtttaacatttaaaaatcaaccaatgtcaaaattcaacacatttttaaaaagctttcagaaaactgggactagaatgcaactttcttaaccttataaagagtatctgagaaaaacctacagctaagtcatttttaaaggtgaaacattaaatactgcccctttaagaataaaaaagtcaagatatccactctcattattcttattcaacattgtcttgaaaatcctatctacttcagtaaggcaaataaataaaacaaaaatgcataaaaattgaaaagaacaaagtaaaactgtttttattcatagacttgattgtttccatagaaaatttaaataatctacacaaatatttagcatgatcacatgatacaaggtcgatataaaaaatgtatttctgtgtactagcagcaaacaattaaacatttcatttataaaatttataaaatgaacacttcatttataaaaatttcatttataataacatcataaaatataaatatatgagagtaaatttaacaaaagacatgcaagaccactgaaaacggaaaacattgatgagagaaagtaagaaaaatttaaagagatatgaaatagtcattgattagaagactcaatattttattttttttatttttttgagatggagtcttgctctgttgctcaggttggagtgcagtggcatgatctccactcactgcaacctccgcctcccaggttcaagcaattctcctgcctcagcctctggagtagctaggattacaggtgcgcaccaccatgctgggctaatttttctatttttagtagagatggtgtttcaccatgttggccagattggtctcaaactcccgacctcaggtgatccgtctgcatcggcctcccaaagtgctgggattacaggcttgagccaccacgcccagccagaagactcaatattatgaatatgtcagtttcctataaattgatctatatagttcatacaatacaaatcagaatttcaataagaactttaatagaaattacaagttaggcctaaaatttatatcgaaataaaaataaccgacaatcatcagaacaacttttaatgaggaggaaaaaattggagaagtctcactaactgatttcaacatttaccataaaacatatagtaaataagacaatgtgatactggcataagaatagacaaatagataacagaaaagaggagggaatccagaaggagttctacacatgtttgattcattcggttttcaacaagctgccaaggtaattcaataggcagggagttgatggcagccctccttggagaccaccgaccacagctcttctgcagtgagcagagtgggagacaccctggtcttggaggccagtgcacaagcccctggggctgcttccacttgagaagaggagaccagttctaggccttagggagaaaagctctctctgccttgcctacttctctgccttgcttttctctgaaacagtatgtctccatctttgagtggttactgggcctgagtccataaagagggaaaagacaggctcaggctacatttggtaatagaagccctcccagcagtcctgcctcgatcaccagaggatgactttcgggttggggcctaatgctactacagaactcacatttggtgtatcttccaagctcccaagaacccaaagcttccaagaacacaaagcaggggctgtgctggagcagggttctagcattaggaggtcctaggtctcagctagatgctactaggacctcaacatatctgggcttctgaaaatggatgtgtttgcagggaccgtttctgttctgcaaggtggtttgatggggtgagatggaatatggctgcactgcgttggcaggggaaagcaaagggaagcctggctttcctcctcctgacccagagcaaaggctaggggctgggccacctcaaacactgtgtgcatagcagcctccctggatctcagctaggggtattctgcaccccccaggggactctggcaatgtgcacagatcgttctaattgttacaaccgggagaatgctactgcatctagtggataggggccagggacactgcttaacatcctctagtacacagcatggttcctcacaacaaagaattgttcagttcaaaatgccagtagtgctgaggtggaaatgtgccctgaataaccttcaatttccccttttggaaaatgtgatacatgtatgcgacagaatactagtcagacataaaaaagaatgaaataatatcttttgcagctacttggatggaaatgggggttattatcctgagtaactcaggaatacaaaaccaaaccaaatcctgcatgtcctcacttataagcgggagctaagctatgggtacacaaaggcagatgggtatgatggacatgggagactcagaagggggagggtgggagaggtcagagataaaaactacctatggggtatgctacattatttgggtgacagtgcactaaaagaacacactttactgctatacaatttatccatgtaaccataaaacacctgtacccctaaaagctattgaaataaaatttaaaaaagaaaaatgttttaaaaattccccttttgcccttacatagctacagggaagctacttagaagcggaggaaaggaccctacattagaagtgtgtttacacgtttagctaaatgaccaggaaggctcatgaaggcagcctgattactacttcatctcaatgcaaggctcttttgcttgtttccattttactattccctcggtctttgaacgttgtttctgctctcccatgacaggcagcacacgattgcagtaggttttcatctttgtttattaccatttcccctacaccctcaccgatttccctcccctattaaaagatctggttctctatgagaagcacaagccaggctagggctgcattaataattgattttctacttctctctcagcaagctatggtgtttgactttgaggagtggctttttataaagccacagtgtccttccagcacaattttgagttgcaatgatctttggtaggtgatttcttttttctcttattgtttagctattagcagagtaataatgatcataacattttcatcctttcagatctcgtacaggggatgacacctgtgaaagggccttgagcttctctgatgacatctttgtaatttttttgagctccaccacagcagctccagctgctcattaacccgccactggtaatgaggtttcactgatgcctctggggagtctgatttgtcagggggcagcaaactgtggcctggacgacatgagctacgccccgtccttcccctgatgtgacaatgctgacattttcatggctgagatggcttgcggctctctccccaagcctgcactggattcttgtcactcacctgcatcattccaaaccatgccccatgcccagcactgattaaacacattaggctacattcattcctgagaataccatacagacattagatatgacaaagcatatctacactagtaaggcagtaaaataaccaaggtctatgaagtgcaacagaaaattgcctaacaacatgcacagatgatctcactgaaccatattacctaccattcatatattaccacaggcacagagagcacctggagaaacacagtagcaactgctcacagtgactaccccggggttgggaaggaaggggggaaagttacaaggaactttcctcttctgggttttgtggggtttttttgttttttgctttttttttttttttttgagatggaggttttctttgagatggtgcaacctcggctcactgcaacctctgcttcctgggttcaagtgattcttctccctcagcctcccaagtagctgggattacaggcgcccaccaccatgcccagctaattttctgtatttttagtacagacggcgttttaccatgttggccaggctggtcttgaactcctgacctcagttgatccacccgcgtgagcctcccaaagtgctgggatgacaggcgggaaccactgcacccggccttctactgggttttgtaatgagcatgtttgtggtggaaatgtgtcaactgcctgtccagagacagttgtggtggctcacgcctgtaatcccagtaacttgggagggtgaggtgagagatcgtttgagctcaggagtttgagaccagcctgagcaatgtagtaagacactgtctctacagctaaaagaataaatgagtacataaataaagaaataagctgaattctgaggaggcttttactctccataagaccacctgaagtcaaccctagccctcaagctgttcagctacagcagccaatactttctgttccctgaatccactttggctgggatttctttcattggtggtcactggtttcactaggattccttatatcctgtttctttgttccaggctcagaacaaggagcacctcctcctggaagcttttccccaaggatcactcctaacgactatgcctatgcccctcaatttggccccacaagatgagcggcttcatgttagcctcagtttcattcacacagatatggtttgtctggaagaaaccaaatctttaaggataagaggtaataattagcataacagagaacatctattagaagcttcctaagggtcaagcaatgaactaaatgttttacatggataattttatttcatttttataacatccttaggaggtagatatcattagtttccttgtctgtaaataagatagtaagtccgagagatggtaaatggcacaattaccttttttatcgtgctgctcagcaatgaccattcctttcagaaggaccaccatgcccctcctctgtaagctgttgctggaactgactgccccacaagtttagaggcagagcttacaaccctagcctggccaatcaatgacccccttcccccagtgacatatgattggctcaggtggacatagaattgaagtcagtccattcagagtggatctcagaacattgctagaaaggctagatttgtgcccagaagtaaatgctgcaaaaaaaaaaaaaaatgctaatggccattttgcattttgcatgacaaatgtcaggaattggacagttctttaagaagcaaagtcatcaaatggagagagattccattctgtcataccatttgagccatggatcaagctatatcttaaaccacatctagccctaaactgttcagttgcctgagaccctctgataggcaccagcccccttggaggcctttcttttatttgaccttttgtggatggaagctgggatgggggtgggcaggagcccagtgactatgtaagcacaggactggctatagaaatggaatgaaatagccctaaaggattctttatgaagattatggaagagaagtatataaaagaattaggaagcagaacaacaaaaccgtaaacaaagatagaaatacagctgggcgcggtggctcacacctgtaatcccaacactttgggaggccgaggcgggcggatcatgaggtcaggagatcgagacaagcctggccaacatggtgaaaccccgtctctactaaaatacaaaaataaaataaaataaaatcaaaataagccaggcgtggtggcgccacctgtagtctcagctactcaggaggctgaggcaggggaatcacttgaacccgggaggtggaggctgcagtgagctgagatcgtgccactgcactccagcctggcaacagagcgagatcagtctaaaaaaaaaaaagatagaaaaacaatcctccccatggaccttaaacacaggccacatgctcatgcttcacacacatgactgtgtgcacacacatatcacacagttctcactctatccctcctccctcccttctcccctctctttgtttgaaagtacccaaaggccttctaaccatttccttcatttcacacgcagatgattttataatctcatctaaaaactgttgatatgaaacataacaacagaaatacaaacagtgaatcttgatgaggtgaaaacaaggtgagaacaataaaatagccaaactggagaagactttgattccagcacaaacccttgatgcagaagatcttacagccttcagttaaataacctgtgtggttctgaggacacagagtaccatgaggacgtggacaatgatctagccagtctgtgaagggctcagctgtcacccacccagagacgccattaagagacctgctttcaggcggctgcagggagctctggactgggctccagcctgtgccccaacaggctttagccacgcaaacttaaacacaccttagagcgtgtctacaaaggaaacctgaggtgactgttcatataattctctcctggaagatgaacacgctccaagcacactgacctgaatcacccccaggcccctttcacctcattaggccttgaaggaaactgcaatcctcagctgctcccacctcacagaagcctgttacagggactggtacaaaaacagagaagcggcttggtccggagagctcctctgcacagggctgataaagggaatccaggaggccacacatgacctttcccccaggtcctgcaacaagaatagtttttgaatctgatcgttgcagccaaagtcaggacacagcagaacagcatccctcccttcccactccctggctttgctatgagctacaatatcgcacctttccaaagaaaaggatattggtcatccaggggaagaaaaatggaaatctcaaggaaagtatttctccagaattatcatttcctctctatctagtaagcatcttctgtcctgcacgcacgtgtaccagcggccacgctcttctcctcaacacatattctcttggcttctgggccctgtgctcttccttccagctctctggtcaggctttctcagtccatccctggctcctcttcccctccctgaccctcacacctgctgtggtcagggcctcgttctgagccttcctctcacggcacacaccctcctccattgccctccaagtcatctccttctataaggcctctcttctaagcttattatgttcaaataagtggtctccctcagcactggcatgtcgtgggaaaaccactgggctggaactcaaaagacgtgcatgtgagcccagatcccctgatatacactgtgaaacccagagaaaactcacctgccctgtgatgatccaaactgtcttctgtaaactgatgccaggccacaggattgtgtgaggatagtgacatcacatggctgggtccttcgtaaaagaaaaaggccagccctgtgggggctactctttgcggtgccaggtagtgggccagcagcccctgatgagggaggtcagctgcggccctgtcctgggcaggggacattctgtgaaccaagtgttacaagttaccgtcactactgaaagactccccaccctcctcttccaaataattctgaaaacattttgaaacaaatgattttggaagataaaatatttatgcaaagaagatattttaaaacccctttcaggccaattttctaaaatatttctcacgggaaaaaatgccttttgagaaagtttcaggcaagatagagcttggacataggctgtctgtgctagaaggttcttcatagaaaccctgtgagctgcagaagtctcgatgttaaacaaataattttccagaaaaccccataacgttaaatgggttaatgtgagcactaaaggtatgccagggtccctggacccctcctgcttgcccacttcctcactcctttagttctgggaatccctggggaattcttggtttgggcaaatgaagtttgcaaacattgctctaacttactctctcctttgttgagttaagaaaggagagacgaccagccaggaactgtggctcacgcctgtaatcccagcactttgggaggccaaggtgggaggatcacgaggtcaggaccagcctgaccaatatgatgaaaccccatctctgctaaaaatacaaaaattagctgggtgtggtggcgtgtgcctgtagtcccagctacacgggaggctgaggcagaagaatcgcttgaacccaggaggcgaagtttgcagtgagcagggatcgtgccactgcactccagcctgggtgacagagtgagactctgtctcaaaaaaaaaaaaaaaaaaaaaaaagaaagaaaggagagacgagaaggaaggtgtgtccgtggccatatcgacagtggctcagaacagatcagctgcatcctgggccaccaagctcacatgctacctgctggggcagctgtaggacctctagcatgacagtcacctatggacttctggcaggagtgatgcccatctgtgaccccaaatgcttctcagtcctcaagggacagtgtttgtttaatggcacaggacactcatggatagagggcagaacccaagatttttgctcagaagcaacagaaagagaggctagagatttatatggaagatgaggaccaactaaaacaacaggaaccccaaagaaccagactcagaaaaaggccacagccttgtcagggtgccagagatgcagggaatgacctccaactccttcttctatcctctaatgacccctactcaaatgcaaagttcttgagtcataagttcgtctctatgcagagagaaaaccttgactgaccatcccaccaagaaggaaacctttaaatgtattatggagttgatgtatttttcttttcttttttttttttttttttttgagttggagtcttactctgtcacctaggctggagtgtggtggcatgatctcggctcactgcgacctgcaacctccacctcccaggttcaagtgacttgactgtctcagcctcctgagtggctgggactacaggtgtgcaccaccacgccccactaatttttatattttctagtagagatggggtgtcaccatgttggccaggctggtctcaaactcctgacctcaactgatctgcctgccttggcctcccaaagtgctggaattaagatgtgagccactgcacctggccattatttttcacacttacatattaaaaagtgcaatggggctaggaatggaggctcacaactgtattctctgcactttgggaggccaaggtgggaaggtcacttgagctcaggagttcgaatccaggctaagcaacaaaaggagaccacgtctctacaagaaaaaaaaaaaatcagctagatgtggtagcatgtgcctgcaatcccagttacttttgcctcctttatcagaatgtttcaggcaaacatgcacttggccatcggaaatattccaataattttctggtagttaactttcttaaatttcttaacagccaggaaacttctttactttattctaataattttcccgttgctacaacctgatagttaaggaagttcaaataccttctggaatctaggaatccatttttgcctcagtagatgtaatgactgcatgaaactgttggcgaatgacattctctgagtgtggactccacgtcaatgctgttccaggtgctttgcccatgttgactccatgaatccactcaacatgctggtttcttatcctcattttgcagatgagggaactgaggcacagagtgtaagtcacttgcccacagtcccagaggatgtaaatggcagaggcaggattcaagcctgacagtcttggctctggagccttcgtgcttagccactctttatccccaaatcgctgtcaaccaaggtgagcagcgaccaaaatttgacaagcctgaaaccactgcttgttgcccccgacctaggaccagctagaccacagttactgctgctctgaagacaacactgtcacttcacacctgctcagggcccttcttggcactgatgaataaacccagcctggggtccgagaaatgggcagtgcagctctgaagacacgcccgaagttctctgtcccgagggaggacctggagccgctgtcccagaagcgtgttcctgatggaaggcactcataggctctctgcaggggagacctgccagttctgtttttattgattttcactttgcaaaaaagcctcttaaatcaaatcaaactcactaggaaatgtgggaggttgcaggcgcactgccctttgtttgtctctagtgctttaaaggtgtgtcctttcttctaagtggctcaggaggccaaaagctgtcctgaaagcatacctcaacttcctgccttcacctctgtcaaccttaaggcaattcttgatgcatttgatgttgttgtttcctgccagccacaagtccatgaactcctaggactctaagacaaacagtgctgctgctgcatttctttccttggctgtctgccctctctgctgcagtctaacctgagggggaaagggatttgtggttccaaagacagggtccaactgaaggaaaaggcatcccaagcagaggggtcagcatggtcgcctgagatgcatgcctgggttcctggccctctccttggcatcctaagcagaggggtcagcatggtcacctaagatgcgtgcccaggttcctggccctctcctcggcatggtcgcctgagatgcatgcccgggttcctggccctctcctcggcatcctaagcagaggggtcagcatggtcgcctaagatgcgtgcccagattcctggccctctccttggcatggtcgcctgagatgtgtgcccgggtccctggccctctcctcggcgtcccaagcagaggggtcagcatggtcgcctgagatgtgtgcccgggtccctggccctctcctcggcgtcccaagcagaggggtcagcatggtcgcctgagatgtgtgcccgggttcctggccctctccccggtgtcctttagtgctgaaatgtcacttactcagaaaggtcttttctagatttccactgtaagccaaaaataaaattctgagcccctcaaatgaccgaatgtatctcccttttgaccaagggaatcccagagaaatctggaaaactagtccaggccatgatggaaaaagggcatcagacatgcctagctttggagtttaggtataaccgacaagcatgaacactgaaacagagatattaagactgacaaaatagactgcagcaataagacactgaattccgacctgactgtggcagagcatcgcatgacagataacagatatcaaagtttcttacccccaaaaatgtttctctgacatagtctgaaatgttcctgaaaagctgtctcttgtgggggaaatttgcattctgtagagaatctccttcccttagtaggttttttttttttttggagagtctgacacctttttttttttagacagtgtctcactcttgttgcccaggctggagtgcaatggcacaatctctgctcactgcaacctctgcctcctgggttcaagtgattctcctgcctcagtcttccaagtagcttcaattacaggtgcccgccaccacgtccagctaattttttatatttttagtagagacggggtttcatcatgttggccaggctggtctcaaactcctacctcaggtgatccagccgcctcagcctcccaaactgctgggattacaggcgtgagccaccgtgcccggcccaagtctgatatcttttaatgtccaataagagaaatttaccatctattctctgtgatggctgctacctggaggcttaatccacatgacaagaacctgggctttcacaacccccttatttatatttgagcatttatttctgctgacctcaaactcttcaggcaaggcttaattctttcaaccaattgccaaccaggaatctttgactccacctatgacctggaagcccctggcttccaaaagtccacctttccaggccaaacaatgtgtatcttccatgtattgacttatgtctttgcctgtaacttctatctccctaaaacgtataaaaccaagctgtaacacagccatcttgtgcacatgttctcaggacctcctgaggctgtgtccaaagcccctgggccttaaccttttggtaaaataaacctctaaattgattgagacctgtctcagttactttctggttttcacactcaaaaaatgccgtatctttatgatcttaaggtaagtaaaaatatttaaacagggcacacacatgaaacatataagacaaactcgacaaactggtctatattaaaaataagaacttctgtttatcgaaagagatcattaggagagtgcaaacagcaagcatgagagcagagtgtatactcattatacacatggcaacaaaggcctcagggccagaatgtgtcaaccagaaataataacatcctccccatgtacctcaaattccatgatgaatgtggacagattttgaaacctacaaaatgcttcatcagtataaggaatgacatgcttggtcttcttggtgggtcactgcaacagtcccagatggagccgaggcagtctctccctttcgcatggcaaaaccagggatcgccaccctcccacctatgcccattacctacaagatgccacccagggtccttggcatgtcttttacagaccttcatcctttagtccttgctgtcatctctccccttatcctcaccattggccccatccatgctgagctccagcccccctgagttgctttgccccgattacaccacactcattaacatccctgggccttccgcaagctctttcctcttcccaagatactctttcctccctgcactggcaagccaccacactcagctgaggatttcaggggttcaacaccacagctgctttgtggcctgctttagagaaccatacagacagggactgtataccaaacacgtcagccccactccttggtcttgggaatggatacaaagaaagcagagatgccaccgaaagaaaggaaaaaaaaaataaaaaaagcctggcagggaagttccagatgatgttgtgtgagagggtggtctctcagaataatcccagcagacgcacatgcacttcctgcctttcctatgagacttccctgtgagactgtgacacagccccgaatcctggctttggcagctgacagacatgggtccaagtccaagctctgccagttactagataaatgaccttgagcaaattactccagctccctcagtttccccatcgatcacttggggtaacaaagccaaccctgccactacagacatcagactaagccactcttgtggtttgaagatggtgaggggaatctgttggattctagttgagcacgctgatgactcatcagttcaaatatcacgtggctttcctatttcccgtgtcagttgcagggcctctaaaatggctgtgacttccatcatatgccccattcgtggctgtccccaggcactggaaacaccctaccttcatctgctgtgccaggcatgccggcctcccccaggcttttcagagactctgaagatttcccaggcatgaacaccttgcacatcccagacacagcccattgcttgcagcagatgtagcatcaaacaccctttgtgattctgaggatcataaaaaacattacccaaaaagtttccttttaaataccaatggttttctctgccatgccacccagatttcaaccgtatgcagcttcatgctaagagcttcactgaaagtaaatgaaagggacagctttagagttggctgaagactgtttgtttgaagggagactgtataagctggtataatgtttaattctggatgtctggtggagagatctcttagtagctatgggaagaaaaaatagataggtatttaagggttttgaacttgggaacagagtggagataaacgggcaaatgtgctttggataagtccaaagtgacatgtttgaatacacacacacacacacacaaacacacacacacacacaaagttatactgaagattatagctgaagattcctaaacaagtctaaagcaagcctttcttaaagaagtgtacagttgggatatataactgctataacaaaactcaagatttcaacagcttaacacaataaaaaatggtatccctcctcagatcacagtggttgagccactctcctggacagccctcctccatgtgatgacacaagtgcccaagttccttctgtcttgcagttctgccttgcttggaccttccacatctaccccatgaacccactggaaagggaaggcaaatgagagtttgggaggttccatatgcagggcctacgggagcccatgacacttctgcccacatttcacagaccccatctcacggcagcagtcagacatgagtcccctgtgtacctgggcttggtgaacacataaccgtctccgtcactagaatcactagaagcattcaagctaccaaaaatatttcccttatcatttgatgtctaaccttcactgaccttttaacaaacctgttgaacatctgccctgggccaagcatgttagggcaggagaccagagaaacacatgtgcatgtgagaaggggcggcacaggagtttggggcccaggctctgaagttggaatccacaggctcaaattctgcctccatccctttttaagcaaaataataccatgggcaatcaatctaatctctctgtgtctctattttctcatgggtttagtggagacaatagtgtttatatcacagatgatggtgagaaccaaacaggaaaatacaaacagggtgtaagccctgcccagaactccacagtcctacctcctcctcctgagaccaagggatccccgcaggtggtgaggggtttgcatgtttgttttacctttaaaggtggggaagaaaagcttcctccaggatgctgggctatcctagagacagctgggccaggccctcctaaggccagcatgcaaaggccacagtgaggggccctgtgtaagtcacatatatccaactggttaccagttaccaaccagttattatacccccaatccacaggcttagaagccctgctaccattacctggagaagactgccctaccctgctcctctccacatgggtgtcagccaggatgccctggccctgcctctcctacagcttctctccccatgccagaagcaggcagcctgtaaatgttaaggctcatcttaggatagagctgcccaggtgggcaaccggcaggacaggctttcccctcaaggacgaagacagcctgggaggaaggaatggcagccattctcctgcctgcctggcccaggaagccctgtggtaggaacccacatagacaaactgagttctcctgtggtttttctctgtccatcagggaaaatgccattttagttattgttgttatccacgctattagcataggaaaaggataacatttttaacaataacaaccacatgtaaagcactttataattttcaaatgatttatgccagcatagcggcttcattccttgaagcaagatgtaacaggctgggaatttatgcaccagacattttaagtttcctcagcagaggtgtcagtgacttgcccaggggccctggacagaactgcaaataagggctgctgactcttctgaccaagggcggaatcagggccagaagggatatttggcctcagtatggactacttcatcagacaaattttttctggtccttatatcctttccactctcagcacagctgtccctcaagatcacagataaaaggcactgtcaacgcactattagacaccaggggagaagtcagtgcaagaaggtcaggaatgaggctctggggtcaaagtaaatcaggccaaaggacaatagacattgaacctaccaccctacccgcttcccatcccaaacggataatgagaaagttgaattaggataaccctgggttcctgattccagccaaacctcgatcccttaactcagccaagtgctacactgagtgccagggacaggggcataagaggactgggggaggcctcagccctgcccccagggaacttgcagtctagcaccgactttctattcctgtgtctatcatcaacgttcctccccaaatttccacaaacatccaatcaaaatgtgctaagctgtaaaaccttaagtagaaatttgctcctaatagagtctggaaattttgatattgccctcagcgcagtcaggcaggaaataggaggctacatggagatggaaggtggcttgtgcgagttaactaaggagccgacttggcgcttctgattttctgcagggacaaaacatcaggtatcagggacctttagatacacatgagagaaaccctaccccaaggtgggccttgctgcctcctacaacggaggagcctggaggcatgccggcttcaggcacagtgggatggaagagcatgtgtgtgtttcagggaagcctcctctgtctctcctccccattggctcccctctgaagcagaccctcctcagtggtggcagcaactccagggcacccaacctgtgctgttccagcaaagtagaaaaaaaacaagagtttctctcctagaattcccagcaaaacctggtggcatcttattggtcataactgggtcatgtgctaactccagaatcaatcaaggagggcaagggagtgggatgtgaggactgcctcacacccaccagccaggctcccacttcccagaacctgagaaggggtcacatgatccagacacaaggaacagtgtggtctcccagggacctcagaggtgcctgagcagaggccacatgtcagatatgtggtgcttacccaaggggcagggtcttcacccattctaatgtgtaatcctctgagtgcaaggactctctgaaagtcttggcacacatccaaaacctttcagggttgttgtaaagaaccattacagctgcaggcagcaaaacccctgaaagagggcacatggcaggttggcagctcccctcctattcctctccagagcaggaaccccatttcatcttccaatggaagagaatgctgcaggacccccatctccccccacagccttccctgcttatcaaacacatcatacagccatctctaaaaagtccacaaaacccaatacacatccaagaaaataataattagatatctgaatgctgggctgagtctaaatgagtcacataggtcttgtttgcatcacacaaaataaagttaactgtctcaaaatagagaggaagaaaaaaaaaagtttgtgacatcttttcttctggcagcagccaaatatgatgagcaagtaataaaacaattccatttaaattgcacctgctctcaactccctcgccctctgtgcaaagcagattacattgtcttgttttttttttctaaatcaatgccctgactataatgatgttatggagtattaattaatcctgatgatcactgggagcctaatccttaaggctgctggagttggaccatttcctcctatcctgaaggccaagtccttgcaagaagtcaaagcccattgaaaggattaaatcaattgttgaagcagtgagatggtggggttcaccaattttcttttcatggaggaagattctggagagaggtagtgaaacagatgagtcctggccagaaggcccccaattgctaaacgttagcatgcaactttctttggaactcagaacaaacaatctctctcaacagttctctgcaatatatctctgcacggcccttcagcaatatatcaagtgatttctcagtgtgttttaaaaataattgaatccaggcatattttcacttcagtctcaaagtctcatggtaatctcaacacaaatgccagatcaagtctaacatgaatgattgctgaatctattttttgtcattatttaaaataatatttgacagcaccttgctgggtgaggaaaggcatacatagatatttggctacctctggtaagtacacattagatatacaggtgctcaatcattttgctgggagtttcaactggcataatgcttttgacggccacttggcaaatgccagcattttaaaatgcattaaccctttgacctggtacctttgtttcaagaaatttataccccagatattcttgtaggtatgcagaaaaatagtctatacaaggatatttactgtaacatcaatgtctgcagaggcaaaagacaaagcatcctaaatacccattactgggggaggtgttaaataaatcatagtgcatctaaacaataatatattttacagacattagaaacaaacagtctgctttgtatgtatggatttagaacaaattctaagatgtgcaactaaataaaacagcagggtaaataactgtgtataggatgctatcatttgtcatggggaaaagaaggtaactcatatacatttatgcttgtcaatatagagacagtctctgaaaagattcactaggaactatttacttgtgaaatctttgtcttctgatggagaaagtaaagagacccggggacttgatccaggaagatttgcttttcactctataccctcatgtgcagtgtgagctacctgttgaaaagcctaatttaaacaaagtaaaacaaacataaaaattactgttttattgaaaaatatcaatacatgttcactatagagaaataataaaatagagataaacaaaagaaaagaaaaattggccaaagagaatcctttcatatccttccaggcatgattccaaaaattctgaaaatggtttcatactcttccaaaactatttctatgcacttttaaacaaaaaggggattatactggtaataacatgtttacattatagttttattaagagaattaaacaagtgagtaaagatataaacatgctattatctgctccacactgtcctaagtgacataaatataaacatacatatttataagtataaatgtataacagtaattggctttgtaaatttttttcgcttaaaacattgcaaacaacttttaatgttagtaaatattcatctaaaacatcatttttaagcgaataaactttatttttcagaggagtttcaggtttataggaaaatcaagaggaaaatacagtcttcatataccccctgtctccacacacacaacctcctcactatcaaaattccccaccataggggtgcatctgtgttaattgatggacctacactgacacatcattatcacctaaagtccatgtttacattagggtttctcttggtggtgtacattctgtgggttttgacaaaagtatgatgacatgtatccaccactgtagtatcacacagaatagttacactgccctaaaaatcctgggttcgtctattcattcttccctccctcctaactcctggatatcactgatctttttactgactccagagttttttctttttcagaatatcatatagttaagtgatgcagtatgttgccttttcagatttgcctttttcatttagtaatgtgcattctcttagtaatattcacttagtaatatccacgccttttcatggtctgatagctcatttcattttggcaccgaataatattccattttctgaatgtaccacacagtttatttgtccattcacctactgaaggacattcttgattgcttccatgtttcagcgattatgaataaagctgctataaacatccatgtacaattttttgtttgaatgtaagtttctatctcccttgggcaaataccaagcagtatgattgctgaattataggttttgttttataagaaactgtcaatctgtcttccaaagtagctgtacactttgcattccaaccagcaatgaatgagaattctggttgttccatgtaatcaccagaatttgttgatgtcagtgttttcaattttggccctcctaacaggtgggcagtggtatctcaatgttttagcttgaaattctctagtaacatataatattgaacatctttttatatgattacttgccatctgtaaatattactgggtgagatgtctattcaggtcattttcctaggtttaaattggctgttactttttttattattgaattttaagagttttttgtatattttggataaaagtcctttatgagatatgtcttttgataatattttctatctatggcttggcttctcattctctttacattgtcttccatagagcagaagtttttaattttaatcaagctcaagttatcaattatttctttcatggatcataccttcagtgtcatatctaaaaagccatcaccatacccaagcttacctagatattctcctatgttattttctatgagttttataattttgtgttttacatttaggtttataatccattttaatttttgtgaagggtgtaagcagatagtgtccagattcatttcttttgcatgtggatgtataattgttccagcaccaattgttgaaaagactatcttgactccactgtattgtctttgcttcgtcaaagatcaattgattctatttatgtgggtctatttctgggctattttttctgttgatctacttgtctattcttttaccaaaccatactgtcttaattactgtagctttacactaagtcttgaatccagagagatggcctccatattactttaaaatcagtttgttgatatccagagaataacttgttgagatttttatccaaatttcatttaatctatatatgagttgggaagaactgacatcttgacaatgttgactcttttcattcataaatatggaatatctctccatttatttagctctttgatatctttcatgagtcttgtaatttttcttgtatagatcttatacatattttgttggatttttcctaagtattttcaattttcagggtactaatgtaaatggcactgtgtttttaatttcaaattttacttgttcattgctggtatatagaaatgcaattgacttttgcatattaaccttgaatcctgaaaccttactataattgcttattccaagagtattcttgccaaatcttttagatttttctacggagaggattatactctgcaaacaaagacagctgtatttttttttcttaccaatgtgtattgtatactttttgtgtttttttttcctgtcttatgtttagctgcactttcagtacaatgttaaaaaaaaggtggtaacattctttgccttgttcctgatcctacaggaaaaattttgagtttctcaccactaggtgggctgtatttcttttactcgtttagtggttgtcctagagttttcgatatacatttacgactactccaagcctactttctgataactctgtagcacttcacaaagtgcaggtgctttataataacaaaatattcttaattcctccctctaccccttgatacacattttgtagttgtctcacagtttttagacactctgttctgttttttttttttttcctcagtcttttttttctgtttgcttttgagttttggcagtttctactgttatatactcaaactcaaagaatctttcctcagcttatattatccatctgttcttgcatgttatgtactttttcattaatacccttagcatattacttatgtacatatttgtaaagttcctgggctgataattccaacactcttgccataccagactctgattctggtgcttgctcagtttcttcaaaccgtgtttttgccttgtcgtatgccctgtaatttttgttgcaaggtggacatggtatacttggtacaggaactgaggtgcacagatgtttagtactgcaatggcaaggtgtgtggagagaaaaacatcctgtgataaagtcagcttttcacttgttattagaacaaagtggagacttctgagctccaacctgccagacaataaaccagaagtctgaaaagcagcattttaaatttacatactatactttatccccttcttttatgtgtaatgtaattcttttttcttttaaacaaatttaaagaccaactaaagatttcaagctgacctacttgaatttgcttcacctcttattttccgctcttgtttttcttaggtatagctgatttgattttgcttctgaagtctgactttagagctggagacttaatttggatactgggctaacaagctttacaaaggagttagaggattcagctagcagccattgaaattcaatatatcttgtctttctgaattcccataaaatactttaatgttccattgattgccaactcaactgttttaaccagtacctaggacctacttggcagacagtcagttttgcaagatattatgccatttaattgcatgataatattacattcatgatggtaatataaatgaggcagtaaaaagcagttgtgaataattaaatgtcaaggactaagaaaatacattggatgacactgaagcatggtataactttagaaagacacccttcaatttcgaacacaggcaggcagcgtatttaatgagcagaacctatattcttgttaagtttcactgctagaaccaaacctattttttcataaaggttcaccagtctttagattctgctaaaactcagttggagaatttcttttcacagcttctactgtctaaggtttcacaatataagaaatataaagtttctcctcttctaaagttggaaagttttatataagaattttcttgcgtctccattttcctcctctactgatcacaactccctcctgctacctcatgtcctttggttcccgggcaggggaattcttcagaaaataatccttccaatcactctctgtccttttcccctcaggtctagataagacaagccccctcaggaagccaggacaaagacgtgggagaaaggcaggtagagtggtcaagaaatgttcttttcaggcaggaattggggtcctcagcctatcttggcagagactccagcaagaaaaatatctaattcattcatccaattaagtggctcttaagcacctgcataggttaagagctggaacagaagtggaagggcaaagataaataccttccatccgatttagcagagaggaaaagcaaggatccagggagtgaggcaataaaaaggaggaatctctaattgccaggactcctctttgagcagtcagagccctgttttttgtggggatatgctctgatgtgctgcttgaggttggtgtaggaatgagggtgactctgaaggatcacaagactgacttccagtggggtcagggtgagcaagatggaggcagaagctcaagtgaggataactgtaacctccagtatagaagagagaggagtcagccaaggtagtgcctgctgggaaagagaagagagaaaaacaagcccactcacctccaggaggctggcctagcagggattcagagcacagagacccaagacatggctgcattggtaggccctcctatgtgacaaccctcctcttagtttccacaaaatatctttgtatgagtgttttcttttaggaaaccacaaaatagaattagatataaactcaaacaactgcaagttttagtcaacttgggttgctctaacaaaatgccacagactgggtggcttataaataacaggaatttatttttcacagttctgggggctgggaagttcaagatcacggcgccagccgacccagtgtgtggtgagggctgcttcctggttggcagcttcctgtcttcattgtgctcccacatggtagagagcagaaggagcagctctctggcttcttctcataagggcactcatcccatgcatgggggctttgcccttgtgacctaattacttcccagaggcaccacctccaaataccatcacactgggggttgggatttcaacgtataaagtttgggggaaacataaacattcagtccgcaacacaatacaaagagaatcataagagtcacgagaaacaggcagataaagagacaggctacaagaattcagggggcaaagtggtcatttccagatggaagttaaagacagccttcacagaagtggcattgaagaacagaggagtttcgaggctaggcaaggggagggtgtcagcactaggaagggaatgccaggcatggggaagggtgtcagcaaaggcatcgaggtaggaaagtgcagacctgggcaggtaccagctaggggtcaggtggttttgcaccagctccttctgccccttcccgcaatttctgtggaacaaggtaatggtctattggctttgcacagctaaggcagattctcaggttattcagatatatcctccagaaggaatgtaattaggggacagaaaggcactgggtaactttaatctttctaaagagctgcccgtccctccctggagccaacagctcatttttattcctcaactacttggctcccagaactgattgctgattccggctgtttggcagagggcgattgtgcatgtcctgggagtgctggccagcttccatttattaatggagactaaacttacccctgtctacctcctctcccacttcacagagaaaagttttctcagtctctgccacacacgccactgctttcagagcccaagacagggctgcaccttaagatgaattggattctcactaaaccaccacactctgtgatcacctgtggagatctttgttgaggaatcctgggttcctgcagcagccaaagaaccagcaccgatacctaaatgtgcatagtcattgacatgcttcattttttatcaaatgagactagcgggtctcacacctctcccactttctcagcagcctctcctctttcctaatccagtgcccttccacactctgcagtggcacctacccagttccactgatagccccagacgcagcatacttgagaataaagagcaggcctaaaagaactgcgatctggtcgctgtttctttccttgctgtatgaccttgggtggggcaactaacctttccgagcctccgttagttcatctgtaaaatgtaaatagaatgcaaagttattatttcatacctcccttacaagaagctttttcaaccgtgacactttcagcatttggggccagataattcttcatcatgcgtggctgtcctgtgcatgggctatttagcagcactgctggccagcagcaccccctgaattgcagccattaaagatgttctcaggcattgccaaatgtcccctagggggtaaagtcacccccagttgagaaccactgtcttacaaccaccttgtgagccaggtagaataaagggtagaacatgtccaggtttggcaggacagacatttgggaatcaaagagaatgctctggcagtggtgacatcctaccccacatggcccagggaggggggttctactgataaaaagcagatccaggaaagagatacatgtgagagatgacaagggttttgaaaccagttaagattttctttagcagaaaagacaaaggtctttgtcttttcacctaagggcaaaccctcttcattactgtgaatattaaccttcttccaaagactctgtcagtcgagtctcaccagaggagtagacatttctcttattaacaagaccttggccctgtttcctgcaaaataataactgtagcaccatttgcctaaggaaagaaaagatggtcttgccttgaaggagcttcccataataaactattgaagctaaaatttctactaatactatattgttgtgttatagtataatttcaaaaagataaaaatttgacttttatgcaaatatatgataaatatgtgtcaaagattttacttaactcattaagaggcaaccagcaagacatcaaaactctatcaaatgagaatctgaggaagagggtattttaggcaacttaaaagaacattaggatgagtgctacatgagatgcaaaactaggtaatgctctcagggccagtacccataaccattggggttatctgttctttatttttttcttagggacagggtctctctccattagccaggctgcagtgcagtggtgtcatcatagtttactgcagcctcaaactcctgggctcaagcgatccttctgcctcagcctcccaaatagcaggcacacaacaccacacccagctaatttttaattgttatttttgtagaaatgagctctcaccatcttgcccaggctggtctctaactcctgggctcaagtgatcctcctgccttggcctcctaaagtgctgggattacaggcgcgagccactgtacctggccagggtcatcctttctaccatttagaaattatttgtatctcaaccagaccaaaatctataggttcacttctgccctgtggaactgtaaagtagccctgtcagtagaaaatcaatgagaggtgtcaatccagcaccccccagaaagaacgcccagcaatcccttatttctaagtttgggctaattcttctaatagttacatgaatattgaatgctgccctcccaggccctgggcgaatcacctctgcctctgccttcaataattaaagtctaggagagcaacagacacacaaaagttaatcacaattatgttgccagataaaaatatacattatcccatctggaatttttacacattcctggtgaaaatctacgttggtacaactctttagcagaacaagatatatatatatatatatatatatatatatatgaatgacagggtcttgctctgttacccagggtggagtgcagtggtgcaatcatagctcattgcagcctcaaacttaaattttttctgtagagatggggtcttgctatgttgtgtaggctggttttgaactcccgggctcaagcaatcctcccacctcagtgttctaaactgctgggattacaggcatgggccaccatgcttggccatacttctttttttttaatagtatttttttgtaatgtttaatttttgtggctacatagtaggtgtatatttttatgagatacgtgagatattttgatacaagcatgcagtgcatcacaatcccatcagggtaaatggggtatccatctcctcagcatttatcattgctttgtgttataaacattccaattacactcttctagttatgtttaaatataaaacaaattatttttgattatagtccccctgttgtgctgtcaaatactagctgctattcattttatctgaccatatttctgtacctattaaccatcctcacttgccccgccaagtaataattattaatggagggcagggccctggccctcacctcatgagctgtgaaaacaacataagtcactgtcagagttgatgcaacaagaaatgtagaggcttaaatatataaaagtagtcaaatataaaaactaaacataataataggaatagcacacagaaaggaggagagaggtacttaaaatgccatctgttgatacactggggtaccaagacatgtctaagaaaattatattttatgttgtattttggaggtaacctccagcaatcagaatagaaatggctagaaaggctgtctgcagggtgggcttgtgaatagcaaggaggggatgccctggctatagcaggacacacaggaagcatgctcatgtttggctgcaggagtgtgggaggctccagtgagcagctgcatctcaggtaaggcccagagactgatgggagattgctagtttgtcaactggacagttggaggaaaagctttcaaggtagaaggaacagaatgtgcagcagcccagagcaagaaagagtaagatgttcaaggctgggagatggggccaggcaggtatgggctggaccacagaggccttatgtgatgtacaacaaagtgtacaaagtgtaattttaccctgtaggcatgggacaccaaacaaatgtaattatttttgttgtatatcttattttgcaggaatggatataacgtcaggaaactgagacacaagaatacccagtctcatggaggagacagagcagagatgtttatatatcttctgtcctcacttgccatttctcaggacttatcaccctatatgctagatactaggaccacaatctgaataaaatacagtccttgcttctcagagactcacattctagcaaaaaaataatttttaacaggagagttaatagcagtaccagtgatttaaaacaaacaaacaaataaacagacaaataaaaacaccaccaggcagttcacaatgagaagcagaatgaagcagcaagagcccaagacacaagacatgggtgggactgacagcaggcccctagatgcagggtgggcttcctggaagaggaaggccttgcaagatagtcaaatacagtctagtgcagacaggaccagggcttccaagccagaggcatggcatgggcaatggcattggtctataggactcaacttccatccctcatccccaatttctccttcccgctttccagagcttctataaccaggcttgatgggatgacattgtaagacttaatggaggcttcttccaggccttcaactttcttgaattttctgtctggatcatgtctaccctgagggcagtgcaaagagtcagttcctgacctctgagcttctagaacaccttttttgtttctaaaacagagatctttcagagaaacggctgcttgagaatcaagaactaaggcagcagaacgagcacaggtctgaggagcatatgctttccagatcctcctgcacagagacaggtggttcgaaaataataaaatgaaacggaaattagaaagaaacacctcttgagtggaagaagggcagatattttatctagaattaaaataggtaagctttagggtgagtgtctgagggtaaaaagagccagaacccttcttattctgagatcaaaaccctgggtgaagccgggcacaggggctcatgcctgtcatcacagccgatctgggaggctgaggtgggcagatcacctgaggtgaagagttcgagaccagtctggccaacatggtgaaacctcatatctactaaaaaacaaaaatattagctgggtgtagtggtgggtgcctgtaatcccagctacttgggaggctgaggcaggagaattgcttgaattactcccaggaggcagaggttgcagtgagctgagattgcgccactgcactccagccggggtgacagagtgagactccgtctcaaaacaaacaaacaaacaaacaccctccccccaaaaaaaccctgggtgataagggaagtccataggaccccccagaagtttaggaaacctgacagcataggcgacctgagcttccacttttggggttgcagatgccagagcctgcaggccccccatagaggcttcatgaagctggctgggcagagggggctgtctaggcaggtaccccttgctaaggccccctggagaaagagagagatggggaacaggccagggaaacttgagaagttctgaagttatggagaggacacagaagttctgttgggcggacccaacagaaaccgaggcccatacaggagatgccagcccaagtgtcagacccactctcatctcaggtgacagtgccacttgctcgttcctgacctccctcccttactcctgccccaccctgcagcctgcaccatccacacctgagctgctcacagtgattccctgggggagccacagaattctaaacaagttgagggatcagaaggaaggaagtttaagcttcaagattccctgagtctacctcactgggtacaattaaattttaggtaaaatgtgaggatggaaaacgaattctggttataaagaaaattcctttttttttttttgcatgcccaacttccaggcccatgaaatcttcacctgttaggtacgaaggtctcttaaattgtgctttcacaattcagcctccagcccggggccaaaatcaattgcactttggaaactcctggggtggcttttataagataaaccaatgccaggacccattccagatcaattaagtcaagatttctgggaaaggggctcaggaaatgtgtactttttaattaaaaactccccagtttattataatgaactatcaaaattgataaccagtctccaaccccaaatccaaaaccaatgctccgctgaagtccgtaaactgggcaggctgccctggaggcccactgcccagtgctgctgtttgcaggatttacggctccatcctccaggagtctctggagcacagggtagctctggtgtcactgctctcccatttacagctgtccgtcattgcttctccgccttcccaggtgcagccgtgatcacagcagggccctcacaacctgccccttcctctatgcaatgtctctcatggaagctttcaaattcttgtagcattctgacccctgaatttattgtctattgattgcatgggattcattactttctattgactgctcatgctgctggtattgtggataaatgctaattcctcaataatttataccatatgtggatcatccaaggcaaaaaacactctttttctcccttttatagattttgttcatttccttctggggaacatcatgatccacatgaaatccggaaaatgaatatgtcaaattattttgatttgcagccaggctgacaatgcagcctcggcttcccattgacaccattattggatggtaactcaaggaaaattggggcctttaaggagatgagccaagaagtggggtgctgtccccaagataggggcatcaggcagggttgagatagccttgagtctcccagcaagcccccagccctctaggcagtttctgttctcaccccacaggcccagctttctctgtgctggaaattagaaaggcagtgaacagaaaagttttctttgccctaataataaagaccccccaaaacctgtgttctcatgtccaaaatcctttcccacaaaccaagcttaaagaataccttttttaaaaaaatggtaataaacagaaagtcacggtttagagtacaggctccaaaaaagtctacctgggtctaaatcctggcttctatgtgagctgggacacattacttcacctttccacctttatttcctcaactttaagtcgaggatgctatggaaacgagaaatgacccaccttagcacagcttacctaggagatagtgaacctgaattctatcctccccagcttgagctgcggaagggccatgaactctgagcatcctggagttctagactctgtactgcacttgtctacagttgctctcctgggcaatgcccatggattttgtttaaaccaatgatgttcagacatatggacttattccatctaattcagagtgctggtttccaatccctaatcaacagaactgccatgaactatatgcccttctctcccagcatttcaaaaccacagcttttccctcttagcaaactgcttggtaaatttcttcattggtttgtatttccttcctaactcccagagttcagaaatcaagctgctttgtttctgggtggtctttgttttcatcattgacaatagcagcagtacttctgcaaaggaggttgaaagaattaaataatgcatacgaaatgcttagcacagtacctgaaataaggtagggctcctctcagtgttactcatgagcctggcataaagtagtgtctcatgtctcaacaaatatttattgaataaataaaaatagtcgtctttctttctttctttctctttctttctttctttctttctttctttctttctttctttctttctttctttcctttctttctctctctctctctctctctctgtctctccttctctctttctctctttctctctttctttctttctttcttttctctttctttttttgagacagagtttcgctcttgtctcccaggctggagtgcaacggcatgatcttggctcactgaaacctctgcctcctgggttcaagtgattctcctgcctcagcctaggagtagctagtattaccggcgtgcatcaccatgcctggctaatttttgtatttctagtacagacagggtttcattatgttggccaggctggtctggcactcctgacctcaggtgatccacctgcttcggcctcccaaagtgctgggattacaggcgtgagccaccgtgcctggcctttgttttttttcttttttgagacagggtcttgctctgtgacccagactaaagtgcagtggtgcaaccatggctcactgcagtcttgacctcccgtgcttaagcaattctcccacctcagcttcctgagcagctggaactacaggcacacatcaccacacctggctaaattttcaattaattaatttagttttcgtagagattggatctcacaaggttgctgaagtttatctcaaattcctgagctcaagcaatagtccagcctcagcttcccaaagtgctgggattacaggagagagccactgtgcctggataatgaaggtagtcttttatgcatttcacatccattatctcattcgaatctcctccaaaacttaatgaaacaggttatatagataagaaaaatggaggctcagaggccgaagtggcttgcccataattgcatatgtaactggggttgatttagaactcaagtgtgcaccccaagctccagatgtaaggtgctctctccttcacagagcactatgacttcaggtgggggcaagtatgggagcaagatcacggtgctcacatggcacttccacactctgctttccctccatcccttcccttcctttccttttcctctcatctgtcaaaatctcccttatctaccttcccctctcccattttccctctgataccagtttcaccatggggaaaatgggggactggacagataatttccaaagggaccatcaccctctttgacaggacataagttcttgaggtgtgggtggctgatacccaggtgcctttcctggaagcagacaaagtaggtgacctgggaacacaaaagaccctgaatcctcaaaggtgatgctagaaggtgcattgggctgaggaaaaagaaaagagagactgagggcaagaaagaggaaagctaagcagcaggaggtgcagaggttaagagcaagggctttagaccagacaacacaggttcaaaacccagccctgccacttatttgcagtgtgaccttgaacaagtcactaaacctctctgtgccttaaggtttttattggtaaaatggaaatgatgatgataacagtacccagctcataaggctatcgtggaggtaaaaggaggtcatacaggtaaaggacagaatagtgtctggcactcaactgacgtctatttttattatttcaagtttgctcatggcagtgctttcctgtcaatgatgcaattcactgcttttatctgcaaaaagaaaagactgccaggcatgcccacacattcaagcccccaagaatccaacccttgaccatctctccagcttccatatcttcaccttatacagccccctctctgcttcctcgagccctcaaacctggctcttgttctctctggagctcaagccagttccccgatgttagttcctgtctcccttcaggtctcaacttctcagacaggctttgcctgactcccatagcaccttgactcccatggcatcagactaaatggcatcttcctgcatgaaaatgcaaactccagaaggacagacaacctgcgaggcatggtaacctatgcaatagtttggggctgagttgtttttgtatgtttcttcttaaggaacacacattgacatgcttgcacacccatagggcatgtctgaaggatgcacaaggaccggaagcagaaactgcactaggaatcacctacttttcaccataagccctaggtgccatttaaattacatgtcatggagaattagtacttaatcaaagcaaatccacaaatccacattaaaaaaaattaaatttggaaggccagggttggtggctcatgcctgtaatcccagcactttgggaggccgaggcgggaggatcacctgaggtcaggaattcaagaccagcctggccaacatggtgaaatcccatctctactaaacatacaaatattagtcgggcgtggtggtgggcacctgtaatcccagctactggggaggctgaggcaggagaatcacttgaacccaggagggggagtttggagtatgccaatattgcaccattgcactccagcctgggtgacagagcaagactccatgtcgaaataaaataaaataaaataaaataaaataaaataaaataaaataaaacaaaacaaagtaaaatttggaaactatgatccttcaaacaggataacagtggcaaaggaatttttacacaattggtcaataaagaacagaacaaagagaccagaaaaagacgtagcaagagttgccttggtgttcacactgcagcagtcacccagatccttgcaagcaggctgttcccaacttcctgacaactagcattgctcaggcgatgcttctgtgcctaacctgcagcagccacgggacacactagtacacacttggccaggcacaaaatggcctcaaagtctccaaccacaacactagaaccttaagacaaagcagtgttgatacagtttcagtctgcatccccactcaaacctcatattgagttgtaatctctagtgttggaggtggaggctggtgggaggtgattggatcttgggggtggtagctagtggtttagcaccattcccctactgctgtctcatgatagagttctcatgaaatctggttgtccaaagcatgtggaaccttccccttcgctctctcccttcctcctgctccttccatgtaagacgggccggcttcccctttgcctttcaccttgactgtaagtctcctgaggcctcctcagccatgcttcctatacagcatgcataactatgagccaattaaatacctttttttttaaataaattacccagtccccggtcgttctttatggcagtgtgagaataaactaatatatatctttaaaattccaaaagacaattctagaattctatatacaaccaacctatcaaacaaatattagggtagacttaagattctttcagaaattaaatgcctccaaatatgcacaaatgagacacgcctcctgagcaagctagcagagcttgtgctccccagaatgagggggtaatctatgaaaaggtaagacataaggttcaggaaacatagaatctagcaaaggagacaggtgaaagaaattttagacgcccgtcttttgtcttagcttagagtcccccaaagcagactctgagacaagaactcatgggcaggcagttaaatttagaggcaatcccaagaatctcaatgaaggcatgcggacgtaagatgagcaagcaagaacggccagtgagtggctgacagtgcacaggttcccactgtggggagtgagtgggtgacagtgaacaggttcccactgtggtgaatgagtgggtgacagtgaacaggttcctactgtggggagtgagtgggtgacagtgaacaggttctcactgtggtgagggggtgacagtgaacaggttcccactgtggggagtgagcgggtgacagtgaacaggttcccactgtggtgaatgagtgggtgacagtgaacaggttcccactgtggtgaatgagtgggtgacagtgaacaggttctcactgtggtgagtgggtgacagtgaacaggttcccactgtggggagtgagtgggtgacagtgaacaggttctcactgtggtgaatgagtgggtgacagtgaacaggttctcactgtggtgagtgggtgacaatgaacaggttcccactgtggtgagtgggtgacagtgaacaggttcccactgtggggagtgagtgggtgacagtgaacaggttcccactgtggtgagtgggtgacagtgaacaggttcccactgtggggagtgagtgggtgacagtgaacaggttcccactgtggtgaatgagtggatgacagtgaacaggttcccactgtgttgagtgggtgacagtgaacaggttcccactgtgatgaatgagtgggtgacagtgaacaggttctcactgtggtgagggggtgacagtgaacaggtttccactgtggggagtgagtgggtgacagtgaacaggttcccactgtggtgagtgggtgacagtgaacatgttcccactgtggtgaatgagtgggtgacagtgaacaggttctcactctggtgaatgaatggttgacagtgaacaggttataactgtgatgaatgagtgggtgacagtgaacagattaccactgtggtgactggctaagtcctgctgggaacctgctatatgaggccatttctgcattgctataaagcaatacctgaagctgggtcatttataaggtgagaggtttatttggctcatggttctgcagtctgtgctggaaacatggtgccaggatttgcttctggtgaggccccaggaagcttccactcatggtggaaagcaaaaggggagcaggtgtcccacctggtgggagtggaatcatgagggtggggaggtgtcacacacttttaaacagcgagatctcatgagcactcactcattattgcgaggagggcaccaagaggatggtgctaaaccattcatgagaaatccatccccatgatccaatcacctcccaccaggcctcacctccaatactgggggttacatttcaacatgagatctgggggaacaaatactcaaactactgaacatttaagaactccgtagaacacacttcagaattatcctgacaaggtaccaagggccaaggaatctggattcaaaccctcacaatatgtctgggggctatcgccacccattcccatcctttattgactgaggattactctcttaacctcccagcctttttgggctgagccccatgggccacaggccataagcattaatggcagaaaaagtgctctgacagacacaagtgttcaagataggatggcatcagtaagcatggaaactgctggtggcctctggtgtgtgccaaggggatatgggtggtgcactggcagcatctgctgcatctgataaaatgcaagctcctgaggatgggcctacactactccagcatccagcacaatgcagtcacttagtcctgggtggatgcttggatggatggatggatggatggatggatggacagttggatggatggacggatggatggatggatggatggatggacaaataagcaaaagaacatagttgaaaataggatgaacagtaggtgcctgggaaagaaggaagttgaaaatggagtttgaccttcaggcacaccaaactaattgtctttataattttgagacaattttgctaaacacgtgccgccccaccccacccctcacacacagcttcaaaggtgatggggacactaagccccaagccatgccacaagcttcactcactgttggcctctgtccactcactttaaggccatattttggttagaaactttctgtggcaatgcttgcataaatcatattaaatatattctttgctcaatggtactgtgcaccagggtagctagctgtgccaagacagctgctaaattagaatgctcttaaatcagccgcagatgcctaaatgtttatagctttgaagttcccccagccatgactcctccttctcctcccaccagcctgatctttatgatgctttttaaagccagctgcagggtaagcaatgtttgaaactcagcacagggacagagggcagctgtgcacatgtggggtcaaccacaaccccaaggtgagtccagccccggcctgtgaaggatggcaggaaaatgagggaaaggattctttctcacagcagagtcatggagagtcacagcagaataggccccaggggatatccaggtctagaattctccagctttttctcacccaaggccctgagctcaaacacaaccttaagtagaaaacataaacaaatgtaccaacagggtggaatgaaaagtgattttgtttattttcaaaaaaagcgccagcagcttctcaggctgggtggaagaatgtcaccttagagcaggtctctctgagaagtgtcatgtgagcggccccctctggcatgcagtggaaggtgggggcaccagcaaaagtgggataggacatttggtggcatcgtgcccccggagcggaaggggaggagtgggggaggaggacacatttgcaaaggagccaaggaacctccaggaaggaaaagcatcaagaccaactcttccttctggagctctgacatgacgagaaactctggggggtttggatggtcctcactgagcctcagggccccagaagagaaccgcaaatgagctgagtccagattagcggtggggtgggaggatcagttctaggacatcaggaaaagaaggccacctgggcccagtgttttctctctgagaggaggaagcatggcagtgactgacaggagactcctgctgccgccttagactctaaatgatgctgggttaggccatcgggaagcactgggcttccctgccaggctagacaggtaaatgctcagaaatgaagaggaaagaactgcacctgcacctcaggctgatgggttacgctaaacagatgcaagagaccaggtgggatggctcacgcctgcaatcccagcactttgggaggttgaagtgggaggatcgcttgaggccaggagtttaagagcagccgggacaacatagcaagaccccatatctacaaatttttttttttaaaaagagatgggtgtgagggcaggcacctgtagtcccagctattcagaagactaaggttggacgactgctcgaacccaaggctgagactgcagtgaagtgtaatcgtgccccactacacccctgcctgggcaacaaagacagaacccagctctaaaaacaaatagcaagcaaacaaacaaacaaacaaaaaacccaacagaggcgaggctgagtgtagaagaagcagactttgccaagttagctttaagttggaacccgaagtctaaaggcagaggttgctcactggcactggtcatgtcactgttagatgcccacaaagtatagacacttggaagaaaataggttttactactggagaccctccccatgcacgtggtggaatgcataagggttccagttcttcccctttcctgtgtccacatttttgcatcaaatctgcctaggggcaaaaggaaattccctgatgttggatgcagtcacatgacttgttctggccaatgagacactggcaagcatggcccacatgctacacttgtatggtgcggcttctcagcctgtgcctctaccatcacctgggaagggagagacttagagaagagctgccctgccagaactcagtgccagccacgtgaactgcaggaaccagtggctggggtttcgagccagtggcttttgggttgctttgctatgtagcatttctgtggcaatagctaatacaaaaattcaagaagaaatgggcagaccagtcggcactccagggagcactgtcgcctctctcagctgaaacaatgggctgtcctggagcagctggcagccctctcctgagggcagaaccattaggatggtgtctcccaggccctgcccttaaccctgctcctcatctctgccccctctcccccaaccccagccccagaatccctgtgggccacaccatctgtgcaccctcttctggatattgatccatccccaaggtccctgttattccagagactaggctggaattgcagctgcttcctcagggtattctagcagaagataatggaaaaaacccaacttgattctctaggatatgggtgttattaatgttctcctgaaagcagaactgagctgaggacttgggtatagttggtttctttagaatttgatcccaggaagctggaataagaagtgcagagggtgaggaaggaaagggagagaagctacggtgggtctgctgggttcgttgccactgtgggaaactgaggctccatcctgccggggactgtctggggagctgtagagaaaacacctcagactcatccctctaagatatgggaggctggggcatttacccacaggtcctatccccatggagagctgctgtccctggtatatcaattacctcccaccaaccacagccattcccaccctgcacctgcccttgagggctgagtaagtacacagtttggagaaatccctgagaaccactgagagcctggatggcctgaggtgagaagcttgcagcctgcaaatgaaggcagagacagggcaggaggcagcatgggcaccaactggggctgctacactgagggcccataagacaagtatgttaactttgcactgtgatcttgctagaccttcacagcaaaccctgtcttacgggtaaagaaacaggctccaagcagtgagtgacttcaccaaggccagctagcaagtgatgacttttgtccccaaagccctggcagccagattctgaatccattgttcttacccttggcctcagggctttcccattaactaattaatttactcaacaaatattaattatgatgtagacactgtggtaggtgatatggaggattgccgagtacagttgtacaatttgtgcactgtgaaaaaataccatatctaggtcacaccacaacagcataaaatgctgtatttattattctaattttctagcagatggtaataatgtgccttgttctaaaaaaagtgtactaaaacaatgttccagtagatatatgaagagtcctgaggaagggcccttgtccactttgcagaaaggcaccatctgggctcctggcagccctgtgatcaggggagtacagtgtaagagtgaaacagacacagttcctgctctcatcaaaactgtggattagccagagagccccatgtccgactaaacatgccgcaatttgtatttatgcatatatttatatataccgtggatgaaaagaacctagtagtctttgctcagaaagcctttcctggcctatctccctggaagaaagaagaatgagaagaaactactcaggcaaaaagtgagagagagtgtttcatcaggaagagggaacagcaggggttcaggcaggagggagctagatatgtctagggagcttttggaaggagccaggaaaggagtgagttcaagcgggggcgagggaagaggcagacagggcaggacacgcagggcccttagaacaaggtacgtgactgagggcatgggaagccacaggagggttagaagcagcctcatggcactagcatctgtaccaccattttttttttttttttgagacagggtctcattctgtcgcccagattggagtgcagtggcacgatcttggctcaccgcaacctccgcctcccaggctcaagtgattctcctgcctcagcttcctgagtagctggcactacaggtgggcgccaacacgcccagctaatttttgtatttttagtagagacggggtttcaccatgttggccaggttggtgttgaactcctgacctcaaatgatccaaagtgctgggattacaagcgtcagtcaccacacctggccatgcaccagctttttttcaaagcagcctgacctgctaatttgcaggataagagggaagctgaaacaaggcaaattagcaaatagaagagactttttttttcccctggggtaagaaagggccctgttcttgagttccatgcattccaccagctctgtggagagtcagcagtggtgggcaaagtagcaggcgtgacaggtaagcagtcagtctgggagaaaattggagggaaagcggcggtggtgttgactattgtgtatgggagaagagatagagaaagctaactaggtgatgggagatctcaccaactgcaatttcagctgtccacagcaccctgaaggctgcaaaaccactgaattatgccgagaaactgaaggaaggagaccacagggggttcacaccctcaggtgatgaatctacttctagccctgaatttttttgttttctaactgctattcagagtggagtctggaaaactcccatttgcaatactgagatgcaccgcacacccaaataatacctggagcaggcacagagcaagagctgagttgttagtgcccagctcccctcacctcacttggtctcagaagaactctgggaggtggcgattctctaccaacgatggaactgaggcgtgggggtagggtcattttctaggatgacacagccagtgagtgttccagttgggatctgtgtcagtccagcaggtaagctcttgggtaaacactatatgaccccccgccctcaccacccccaggcctcccccttagtcttctccgaattccagcttaagtcattcctattgtcttctactggagctttttcatctcatcgcaggtacataaaatcgccttccctcttctgtcacaatttgccctcctctcttggattcaaaggtctcccctaggaaaccttccctgatcctgtgtgatggggctgtccgcatagttccacatgtgactgtgtgtacacgcatgtgcatctgaagtaacatgcccatttttcatgaactgagactcaaggaagtcaaatgcaaaacaagtggctggcatggtggctcgcacatgtgatcccagcactttgggaggctgaggggagcggatcacttgaggccaggagttctagattagactggccaacatggcaaaaaccctctctacttaaaacacaaaagattggctgggccatggtcgtgcgcatctgtagccctagctatttgggtggctgagatacaaaaatcacttgaacccgggaggcagaggttgcaatgaactgagatcctgccaccgcactccagcctgggcaacacagcaagacactgactccaacaaaacaaaacaaaataaaacaaaaaaaccaagtaagaatccacaaagaaacatccatgaaattaaaaacaaaatgcaattctcattgagatggagtgtttctaagacagtaggaccttatgtcttgtggaaaaaaaaagactcaggaccccaatgcattctgccataaggaaaaaattaaggtgaaagctgagacaggcaataagttgcctctgcatttgttcctgagcagagctacagaaaaaaggttaaagatgagcttttcttatgtaaactgctgatttactgagcgagagaggacttgtgactgactactccctgcactactcctccttttcccttgccacatgtagattcagtaacgtgaccatgctcttccttttggctctccagcctgctcttcccctttaaatagtgaagccctcagggttatctttggagaaggcacagagcacagactgtttttgggattctgtattcctttcttccaggcatgtccttaaccttggcaaaataaacttctaaattgattgagaactgcctcagatacttttgtttgtctgccctccactctcccaccgtatggacatttgagaaatcaatcccaatgaaataaatacaggctgctgtaattgtggcagttcattaggaatatagaatttttttaaggcttcaaggccaaatacctgctgatatagtcaatagcaaatactaataactgcatgcagagaacagcagtgacagaccaggcaactgcgatatacatgaaggcatattcctcatgaatattcaaggccttcttctaggaagaattaggcacatggttgcctgactgggtaaacaggtgatcagcgtttgcagcagatccgatgtaaaaatatggcagctgatgtcagcattgaggccatatgccagaaaacagtatggggaagtcttcctggtaaaaaagcacctctgaagatcaaaatggccccctaagtgacagccctgagcagtcattttgatatttgtccataacaaagtggggaatgtcaaccaaatggcctgaaggtaatggcaaacaggcataaaggacgcagcttccaggcctggcaggagccaggaggcccaggtctgagtcttgcttctgtcaaaacccttttcatctcctgccctccttctaaggccactgccacctctgatgttccatgattcatgcgtggaggaaatgcacactcctcttccgtaatgctaatgcggcttctggctgtgtggaccgtgcaccagatgttgtgctaagcgcttcacagtggagcacactgctctgacctcgggctccagctcggtgtggaagatgcggttccactctcttatttgatcttcacatcaagaaacaagtctattattcaaattaacattcaagatgcttatagtaaaatggaatggcataaactctgcaaggataaacagccatctccttgctctcttggagcaattcaacgggcctcacaggggaagaggccaccagctgcttactgactttgcttggctcagcaccatgtgcacaggtattgccctatagcactgcacaaacaaagcctgtatgctatactggtggtgactgaagggatttttcgaggcctgatttagcaaccggcattataccactaggcctggcatttcattccaggtcggggtctgcaaacaccttcaggggcagttaaggcatgactggctaatccacctggagggtcacagctatgactgcctcaccttttctaaacaggccaacagtggtgtgtatgaggacaacactcccccaaagctgtacccttacacacacacacacacacacacacacacacacacacacttatacacacacgcacacagtaatacacacactcatacacacatgcacacacaagctcatatggtacataccttgagagaaactgttcttgacaaatcactactacctcctaccatcaatgaacttgagtcctcacaactaggaggaatggaaccccagcccactgggaaaggtagaaactgaatattagagcagcaagtaatttggaataatcttatgactcattaaaccttcaaaacttaaagagatgtttattttacactccacctaaaattcagcagttagcacaccttccatccccttcctcgtgggcaggacagcacagctaatcagcactcggctcttgcctctgggtgaactaaatctgtcttcagtcacaacggacctaagcttaatgagttccatctggtcttcgtggaaagccacctgcaccacacaaaaaggcagggaagtttccctgggaaggcattgggacctgaggctggggggacctctggggctggcaccaaccctcaggtggccttgatctggaggagacagcactgtctcagggcttgtaggggcaccacgtgggctcctgaccatgccatccctcacgtgagctccattctgttccattagaagcctctctagatgcccagctctccagtagccatcttgactttcccctctcctcagctcctagactggtagcccattggagaattagcttgtgtttctagctggtgccaggaagatatctgggtcacctttgggggaagtgattgcagggtggtgcaggatattcctggggggactcgttgcaagggtactgcctgaggaagcatctctgctcctttgcagaccaccttaggtgcagccaggcgccaccctagaggagagaagcattatcatagtttcattggaagaagaagtttccagtgacgttggttgccccttatcccacatcagtccttttgtgtctggaaggcttggacccattgcaggaacatgctctcctatatatggagggtgtggaatgcccaaggggctttgggagtggtccatggtggacctgggactgggtagtgggtggggaacaaggttctgaggtaactgaagcccagacctctaggcagagaggctgctcaggggaacggctgtgggcatgatgagacccatcactatctcatgttctcagcctccatcaccgctgtcaaccctgtccccagctccagactgcttctctgtttccaacactcagctccctccataacctcctgttaacttatgcctcagtctctctctaaaactcagagtactctccctaaaacatctttccctttagcactgccaggctggaaacttcaggggctgctcactgatgcccagacgaactccacatgccttggtcctctgcaatccaggtgccctctgctcccaccgccctgccagtgcctctgccctgccccttcctatgcagaacttgtcacagcccagccctgggcccaccacctccatgaagccttcctggcctcaccactccagcctacaccacttctccctccctagggcctgtcccctgcacccttcccttgttcctgcctcttgataacacttccgggagcatgtcattatcacatgtctttgattctaagactcacatttttttacacgtcaacctctctgaaacagggatgcagcagtaaaaaggaggcccaccatgactagctccatgtatgccaagctcactctgggacaaattttgtttctggtttaaagcaaggatgaccacagcaggggtcagtgatgtctcctggcctgaagcagctttaggctgcaactctcctaaatggctctgagggggaccctgcacaagccaccagcccctcaaagggacagcagggagacattgatgtgtctcctcttctcatcctctattgtttctggagacaaaagaagcccttgaaatatttattggagtaataaaatgtcatttaattccttgagcctaaggaagagtggatgaagacctgttcccaggggttgtccctgagcctccccccgggacatgccaaagctgcctcagataaattctcttaaaagtggaaaatgtctctgcctgaggctgcagagtgatcgctaatggaagaggcctcacctgcttcctgtcaccaccaaaaggttcgtgattttgacagctcagccctggggaggagctggattcaggccgggctgccagtccctcgcatgctagatgtgctcagatgtgtccctggcgattagtgtcacagcaggcaggggcatgagtgtctccaggaaagggcccttccccctgcatgtatcaggagaagtaggactggacgccagatacagcaaaacaagccaagaagccaggcctgggagcaccatggccgttagatgcgggctcttccagctggacagaccggcagttctggatcttaacttcaggcgagtgaggcttaggggagcaggctggctccaggtcatgcaggagcagggccactggccctttaccctgtggggttaggaaagctcaatattggaaacggggcccagaggagacagcatccaggggctgttcatggagaccacaaatccggcctcgggtaacaacaccctctctgcgaagaacagaacccacctacccaggagccctacagccaattccaatagcaaatagaaaccagcatcatcagaaagggccaaagggtgaggaaacagccactttcacttgaggtagtcaggaaggcttcaaggaggattttcagtgcacagagtacaggatgaggagagtgagttttccaggaggagcacgtggcaagagccagggccccatgatacgatgtccccagccctgtgatatgatgtccccaggggtccccaccagcccagcagccactggggaaatatctgcaggtgcatcagggccttggggaggcagcaaggtgggaaagatcaaatggagaccatgcttgtttggcacccacagcccatctcaaagtccttgctggaatgcttcccaagacacccatcagtcttccagaaagttctccctcatgtctatcagcaaaaatcttacactttgtcctcataggttttcaggggcctgaggccactttctagaataaaaactgaatagatgcaaaacacagtggtgtatttattttatgttcaccttttataagtattttcaaatacatgtaagtatcagagtataatgaacccttttatacccattactcaatgtcaataattaccaacattttgacagccctgtttcatctgttattcccacctccatcgccttgaggtatatttaaaattcagcaaataaagacagtttttaagaccaaaaataggaaaaaaatgatctatatagctgatgcttacatgctagttacagaatttgtaaaaatgggtatgcattcatggtgtgcctgaggcagtgcacgccgagaatggaacgtcaatctgagctgctgggtaaacatcttcttactctccatcagagcatccgtgaaactgccgcagagagatgtgcatcatctgagtgtggagccctgcagggatgggaccctcatggctgggacagaccctgccccagccagcccccaagtgcagccaggaccacagctggggtgggaggacaggggctgaaagggaagtggcagtgcttgtgacattagaaccctcctgggctgtcactgaaaaactcctccttccagctctccctgcccctgccagctcacttgcatggtacagaacttggctattagagtcaacgcaccaatcgagcctttcatccagtggcctgcagacactggcatggcaacagaagaaaaaactgtgaaagtctcattcgacttgtcttccttctgttttgaagggaaaaagaaaatgtgtcctggcagtcatcattactgacttggtgaaatatcgtctttaatcttaagatctgaacaacccctgtaggtgggcatttttgttttctgtcttcccacaagcaattagaagtttctgctaagatagttaattccctttttattttcactcaaatactcttaacagaatcatgcagactccacattgtctaattagagagcatttacaatggtatcatgagattataaaacaaatgtgtgatgaaatgtgtgtgaaaatcagagcacggtgaggcctcagagtggtgtgtgtatagacagtgccagcttagatgcgtatttccaaggggtcgttgccacctagcccctcctggaagaagccaatgcaaaagaaagctaacccccaaaatgtagggggttagtggtcctgaggaccctggagccagggagaacaatggcttccgtctcattacatcttggcccttcctgcacatcccatgcaacccaaaaagttaccaagacaggtctcagtaaattcagaggtttattttgccaaggttgaggacgcacctgggaagaagaaacacaagtcccagtaggatttgtgacctgtgctttttcaggatggttttgaggacttcaatatttaaaggggaaagagcgatagaagagagggagggatgaaaaaaggggggagggtaggcagtgaggccagtggttgtgtgctcatgaggctttgcttagtgctcagtgaatctacattttacatgtgaaaagatgggtagagaaacagtcaattatccacattttacataagataaagtaagcatgtaggccgtgcctcacacctgtaatcccagcgctttgggaagccaaggagggagagtctcctgggggcagaggatcacttgatgtcaggagtttgagaccagctggggcaacatagtgagactccaactctatttatttaaaaaaaatcattaataaataattttaaacatttaaaaataataggaagagaaagtaagcatgtgaaattacagctgtctgcctgggaacataaaaaagaaggcagaataggtgactcagctcccaagcttaacttgtcctttggcatagtgaatttggagtccccaaaatctactttctttcacatccacataccccttcctgaagacccagccccaggctcagacacacccgctgggaccctgatcgtggagtaagcacatgtgcccctggactcccagcctgcctggcgccgcctgcctctccatcctcctttcctgctgctcttgtctcgcttatgctctaggtttgcactgcactgggcccatctctctccctttcaacagccaagccctctcccatggagggggagctccagatcttcaggacacactcccctgttttggggctgacttcttgtctttctgtatttggctgaaatgttgcctcctcagacaggccacctgtcagcttttgtcattctctgccccattctgagttacctccacagcgctccccatcatctctgttttctctgctttcacacattctgtattccacactaaaatggaggctgtgtggagaagggaccatgctcatcttactcaggctttgagccctagcaccgggaaaccacagggcccggtacacaggagacacaaggtgaaaacatgaaatgaacgagcaaatgaatgaaagcacaaacagagtggaggcccctttgggagactgccacagccccacaggggagcacgctgcaggtgggaaagcccctttgggagactgccacagccccgcaggggagcacgctgcaggtgggaaagcccctttgggagactgccacagccccgcaggggagcacgctgcaggtggcaaagcccctttgggagactgccacagccccgcaggggagcacgctgcaggtgggaaaggctgcccaacacttgatgtgatcctgtctggcgctagaattagtgaataaaattcaattcaattcagaaaacctttactgaggcttattggggcctgggtggttagaacttgtgcaagctgttatggatccaagatctcctctacgtaggaactggagcttcgtaaggcccctgaccaagccacagagaagattctatcttggctctctccctccccttggctattctttctctgattcttttacagcagtttctcaaccttggcaggattgaggcttggggccagataattctttgtggtggggtctgttgcactgtaccttgtaggatggtcaccagcatctgtggtctccactcactaaatggcaatagcactcccatctccagtggtgacaaccaaagatgtctccaactattgccaaatatcccctggggcaaaactctcttgagaacctctgcattacagacttttcaactcctgatttctaaacatcagaatgaacaagactcatgcagatgggttttaaaaccttgaaattggatgagattcaccgggcagtgagcgtagacaaagaagagtgtgaggagaggtgactcctgtatacatatctccattctgggcctcttcccttgtcacaaccaaactgaggcccacttgcctgatgtggtgcccacagcgaggtttttgccgtgatagaaaaaaaggtgcttacttgcagggtgccaggtgaagacaaccaggcagctattgctcaaatcctggcctccctgacggcttgcaggcgagggtttttaaaggcagggtaaatttcaggaaagaagctacaggcaaaataaaaaatcaaatacaccatggaggttttacattggttaaagcttaaaaaggtaatgtaccttgaagtagggggcttataggttgtaggtagagtcaaagattttctgattttgtaattggctaaggaagagaagctttgttgacaaattttgggttactggaaacatgttaactggctaagagtgattttctttaagccccccaggaacaaacaaagcaatgaagcttagttctcacttcccccttgtgtgcatctggactcgttaggtggggtcggcacctctgaaggacaactcagggatacaggttaaggagcagcctttagtttctatagtgaaaccaaacatctctggagctttaacttcctgggctaccgttttaggctacgatatacttttattttaacaagttgcttatttactcctggggcttctttcacatccacataccccttcctgaagacccagccccaggctaggtgtctgaaatttctcttgaaataactcaggattttcctttatttccatgcttagggtctgcaggcccctaaaagaaggggtccctgcttcatctcaccctgaactccaagatcacatatccgacatccaagctggcatccccacttgatttgcatctcaagctcagcgctcccactgctgagctcctaatcctcctctgctctcctcgccatctctcctggtctcagtcaacagcaacttcatccccaactgctcaggccaagagccctgtggtcacacttgactcctctttctactctcaacacaactatcccatcaccaagtaacccatgggctctggctgcaaaacttcatttattccccccagagttgccaccctgggtcaggcccagtgatggctcatcaatgtcatttcacggccacctaacaggttcccagactttgaagtggctgggtctccaggcggcagctgcaagggaactcctaaaacacagaggaaaccatgccactcccgcctgtcaaccctctatcagcttccctttacacctacaaggacatgcacactcctggccagggcccggaggccctgtgtgatcttcaccctgcctgctgcctgacacactggccctgtgctctcccactttgctcctcagtgtccagtacctgctgctcctcctgccaggctccatccttccaaagatagccaggtgcttgctctcttccttccagtgtctgctcaaatggcagctcatcaggaaggccttccctggctacgttacataaaaagcaacttgctgggctccctcacccccagctgacttaaccagcctaactgttcaccatcggactatcctgaactcactggtgtatgtgtgatgcctcttgcaataggatgtgagctccatgagggcagggactgtattgtgttcactcccgtatctccagcacttggaaaacagtaggcactcggtcaggatttgttgatgagatggtcttttgctttacataccttgacggaatacaaccttcacaaggcactggtcaacaccattacaatgcctccagcctgtctcagagactcacccacagttatgctatcctctccaataccatatgaattctgtctccacctgtccaggaggggcttctggggaatattgtctagaatctgatctgtttttttgatattcttgattgataatactgctaattaattctggatatgtccaattattccagattttccagtactcaccataacttatacccaacattatgccttgaagattccaaatttccccaattttatatgtcatacaggggagacggggttgtttgaggcacagccataaatcactatcgataaggaaatgcaagatgagtagaacaagtgtttttaaactctcgttaggctccatggtcaggcaggactaggcggtgttgcatgcaactaacaaacatcccttagcacaggggtgctttggtctcctatactcatatccaaaacccacccacatgttgacttcactgctggaatctgtaaaaggttggttcgtatctctgtaagatactgatggccaggtggccagcacaggtgggatggccctaacctgcccacctttgtggccatagttgcttgttattatatcaagttccaatggacagatttaacccataaaggttgaccaaaggcaagcaggtcatgaggtgcaaaatatgttaaatacaagtctttccagtgtttcagggctttaaggagatggttaattcaacagaatatcagtcagcagaaaatcagtcctttcctttcagggagagtcacaaaaggatactgtaatggatgacctggaaggcccatgggagaaactatggccatagcctcccaactcttcagagaatttggaaaggaattttaaaaaggaatagcacatgagtcaaagtcatctccttagggactggtctataatgtccctaatgatggttggtttctttagagttcacctttcaagaaacctttcccccaccactatcaccatcaccaccagtaaaaggggttcacctgcacatccccaacttgcaatccacagaatgcacctaccaccccttgacagtgaagcctcttcaccttacttgaagaaggattctccttttgtagaagccccgctattaacctctcacataaggaacccagagactgttcaaaacaggggttggcaaactacagcccatgcatcaaacccaaggctctgcctgtttccatgcataagttctactggatcacagccacacccattcttctacccactgcccatggctgcttcctgctaggacagcaaagacctggggcccacaccatctaagacacttactacccgatcctttatgaaaaaaatgtaccaatccttgtcttagagcagtcagccaaatcaacagacacaagaatgccattgtaaaaacacacagccacgcaggactgctgtcctgtcacccacttccacagttagcacacagaggagagtaggcaaagaagttttgcccatcagcattgtggcagatgctgtgtgccccacagcgtcccctgactcccacctctagaattgaaagttgctttctgcaaacaccctagactctgcctgaaatttttttctggccaaacgaggcaagctgaaagctgccccacaaggctgatcttcatcatagatacatgggtagttggtggataaataccttagctccttcactcttcagttgggctaacacaggtacctccaaaaaaattccttttttgtttaaactaattcaaactggctttgtagcccttgtaatttaagagtcccaactaatctcagtgagcttttccacagcatcttctccaggaattgatcagggaccaagatgcccaacacagagtcactgggcgctcagggctctgctgggacagaaaccccaggtaggcccgttgagcaccatgacagtcaatacgccttggctcaagagaacaatgctggcctccctactcccaccattcaaccagaggctcacacttgatggcaagtctctgtggcttctggggctacgatgagaaatgacttctgtcctccaggagcctgcatgacctgcctctgcctctctccatgcttgaggctgccccagcctccccactcataactctgcagactcactgcctttcttccatttctttcaccaggccaggactttgctctcctgggggactttgcagttgctcttccttctgcctggaacatagtccctaagatttttaaattgctggctcattatggtcattcagtactcagcaaaaatgtcacttcctcagaaaggtcttccttgactaccctgtctaaagtggggctgtcactcctgcccccacactctaacacatcactctgttttaccttccaattagcacttgctactgtgagttcatcctgcttatatgtgtgcttatattatcggcctctaacacagctcatgctcccgaagagcagggacttgtctcttatttactactgttgcccccagcaccaagagagcacattataggtgctacatcaatgtgtgttgggtagatgagtgagtaaatgagtggatagaaggaaagagggaggaagaaaggaaggaaaaaagaaaggaagggagggagggaggaagggagaatagaaataagattgattcctctccagaactgcccagatcttacagcttggggctgggttggtcaccacttgagccagaaatgttttcccataaaatacgtatcaatgagaaatgtattaagctgcaaaagtcaactacaatagctaaaatatatgagattctttttctttttttttctttttgagacagagttttgctctttttgcccaggctggagtgcaatggtgtgatctcagctccctgcaacctctgcctcccagattcaagcaattctcctgcctcagcctcccgagtcgctgggattacagctgcctgccaccacatccggctaattttgtatttttagtagagatgggtttcaccatgttggccaggctggtctcgactcctgacctcagatgatccatccaccgcagcctcccaaagtgctgggattacaggcttgggtcaccgtgcccagcctatttttcttacataataagtgtcatgttaggcagttgctagcatcagtttagctgtttaatggtgtcatcagagacccaagctcctttccacttcattatctttagtgtggtggctctcccagatgtgtcttgcctcatggtcacaggatggctgctgcagctcaaacatcacatttacacacaagcagaaagaagaggaagaggtgatgacagctttacctatctaattcctttcaggaaagcaaaagcttttgctgaaaccttccaccaaccacattatatcacattagaaccagatcccatgacatagctacaaggaattctgggaaactgactatatatccctttcagccccgatagcagagaagcaggtgagaaacagggggttggaaacaggtgttctgttgaaccaaattctagtttgtcactgagcatatccccagcagccatgacaactgaaagagggaggacaggaaacatccagtactgaccaaggagggttaacaaggccaccagagagaaatgtttctcacaccgattccagccacatcgacaacttacaatgcagtgagagtgtgctgaacacaatgatttgggaaaacacaccccaggagtactgaaaccaagttgttcttatttcagtaatctgtgggcttcataattaaatgagatgaaataataatggtgggaaaatgtgtcagttttttttttttttttttttagaaaggctaaataactcactacatttagttaggaagttgttacaagctgttaattattttcagactaggtaaaagaaacaaacctgggagatgtgtctggtgtgttaacacatattatttaccccgaggtgacattttaatagcagggaaaacacgggcggtctcccagccctgtgcacattttgccacaagccgctgtgagcgcataaatcctagctctgtcaacagtaatgaggcccagagagcaggcacctgctggggccctgaaattttttctgaggaaaatgtacataattaaggaattgtgagcactcacctctgatttattattaaaacaacacacctagggccacatttgctccctgactcgtcggtgctaaacagacaagtgattaaacatcagcctcacagggggtcccccacactctccctgcaagctttccacatccgggcccctgttcccagagaaggaaaagaaggtgcgtagcagcacggcagtgagggtgggaagtgcgtgctgggaggcctctgctggcccagctctcagaagagcagggctcacggttaacaacactgactgagatgggccacactggattcagagtccatctctaccatctaattcctgtgtgctgttctacttccgaatctcagtttcctcactggtaaaatagagtggacaatggctcctgctttataaggttgcagtaaggattagatatagccctgggcagagtttccagcaaacagtcattgctcctggtcacaggatggctgccaaaacagctaacatatccacattcaaggcaggaagggcgagaagtgggtgacactagccgtatctgtgctattaaatctacccaaccccttgccaacagcagtaggaactgctatgagcttttctgtgctccctaaggcctaggcagtttcttcatggtttcttctatatcctccacctatgaagattctgttcctaaacccactgtctcctgcaggaagccatccctgaccaaatgggagctcggtactatgtcaacctcagtgagagctaccacagtgtatcttcaaatcacagtctctgtggacacatagtgggaggagatggcaagcacccaccaggggggcctttccccagtactttgttatgatgcctaatagatgccatgaaaagacaccagagcgccagtgtaaaagcaagcccacgtgccaggtggaggaggtcatcatggactgctctatcgccagagccagctccccacgaaggaaggagggtgccccaccctgcccgacactgaagccaggctgctcctcacagtgtgtggctggcaagtgggagctggggagattggcaatgcatcagaaagagtctagacgagggcactgcttctgacagaaatcgctcccaggatgctctagacaagggcactgcttctgatgggaatggttccctggatgttcacctgggtaagggctcacaaaggcttctccatctctacctggggctcagggttggtgtgagacagagaaaaacgcatgaggcctgatcctcagggtattgctccgtggtagctgcgtggctcatctcacactgggtagcccaggaggtgagtgctctctgagctggcaggacacaaaggtggcccttcaaaggctgggaagtgagggagggctgctagggacaggagggactggagggacagtgattccaaaaggcaggaggagggctagggaacggaggtaaacatgggcaggctgggtccataacactggatttcctcaactctaagacatcaatttggggatgatctttcaaaactcatgcaaactctcccttaaatgacacaagggtaaagtgcatcttaattccagaatctcctgatgtgggggtggagtcgagagtggccacacctgcatcaggcacttcttgtccccatctctggtgcacgtgtgccctcatctcatcttcacagccaccctatgagggacaccattgccagttctattttacacgaggaagctggaaattggggcttggtgatttggtcaaggccttctgtagccctcgctagctggagttcctgcaaggctcatgggaggcaggggctgtggatggggcaggtccagttgagggaagaagaaaggtagttgcccaggccctggccatcatcatcacccacctgtctcctcctccactcagcaatcagggcaacctgccttccctttgcacttgaagtgaaatccaagcaccttgcacaactgaaaagttcttatcccacacggcctgggccgctccccaccatgtcctttctctcttgaaaagaaaggactcagcctctagtcattcagcccatggcctgctgaccttccaattacagtaacattagtctcctctatttccttcttagctctctgaaattgcctgtttcatttttgtttgcttgttggctccctctggccacacacacactggaatgtgagccccaccacagcaggggcttttgtctttttctcactgttgtacaccttgtgttctccaaatgcaaaagtccaccccacccccagggggtagcatgccttaactttgaaaacgtcacccaaaccagggggcccagtgggacctaagtcagaagcaaacagagctgagcagtgtcccagaggctcgtcctggcctgtgcagatgacccatctctaagcccttcttccctgagaatgagacgcttcctaagtgctcctttcctccctctgctctgcaacttcagacccagttcttctctgtcttgtcctgttaggagtggagctcaggtgcctctccatgtccatttgtcttaccacatcagaggcagcctcttcatcagcgatggcatcccaaggccgctcagcattcccagagtgatagaaactactagaaaagtagttccagaaccttctttcagtggaaagccattggaagcttgtgaccctttcaggacatcagttaacatgtgcttagagaggcctggcctggctcaccttggggtttatgagagaagatgtagtcctgcctttggagaagtcggtctccttagaaaaccaagactggtgcttgcacagctactaaagatgcattcagaattatgttgcctttaaggctaaattgtgaaataaaaacagcaggtggctgaagagttcacaagccacggcgggctggaattgccaggaagggcttctcggaggaggtgggagagcacacagcctcagccctcacagacttacaaggatgaattctctgggagaggaaggtgcttctgagagcataattgaagtcttgatgatgttgaggtttttccaactcgcccataggttttttgttgttgttgttttattttctaatacattttacaactgctacacatgtcgaagtcagagatgaaaacttacatttcccaattaatgccactaaaacgtcattctgacagttccatcaggcatctacagtttcaagcccctcccagcttcggggagctgggagagaagggcaggagcatagcccactcccatgccttaactggccccaaggatgggtggggtttgcaaaccataatcagaagtggagagacaggagtgcttcccgggagaaggaactcaatgggtaaggaaggttccacagatggaaatgcataaggaattcacgggaatcttactgaacatacatggaagcagcaattcctattcaccaagagccctgttgcaggtgctgggggagaagcccccactgctgcagctgtgtcaccgcacagcgtttttctctaattcctctgcaaatgcagaggctccgtcctaagattactactcactgtgattacagacaaaaactctaatgtgcattcgacacttgaaaccctttatttcatcagatcttcaaaacagccccataaggagcagaatctataagctgaagagactgaggctcagagaaattgggtggtttgccctgggtcacacagccagcaaaagcactggactctgcctggcattcttctcttccagccccctcactacgctccccgcagaggcctcatcccgctattctacctgcagtcctcaccagtgtacacactgaatccaagtatcagactgaggaagtaatctttttttatgcagtgtttccccattacaaagtgatattgccttgtcttttcatattccattttccctcaaagctctatcattaaggaatatgttctgacttatccagtaaagtgtttaaccttttttaatgttttattgattcttaaagcttcggttcccccagaagatcctgattgctacattaacaatgtcattgatattcttttaacaggccctctgcaacataaaatgcagcatgggaaagatgagccccaacgacctgttaatcaatgagctagtcttgcatccacctgctgcacgtagcaggagaatgggtggtgagaagatcgactctcaggttccggcaggggctgtgacatccaaggccagacagctgggctgcccgagtgtggagcaaatgccccctttggaggcagttggtggaagaggaaagcatttttctccaggctgctccctccaaccccttacaaccaacctggttttcacaaagccaaattcagcttcaagggcagccatgcattaccctttcagcagagttgagatataaagtcccaatacttttttttcctgagacagggtctcacttgtcacccaggctgtagtgcagtggcacaatcacagccctctgaggtgcaagcgatcctcccacctcagcctcctgagcatctggagctataggtgtgtgccaccatgcctggcttttttattttttgtagagacagggtttcaccatgttgcccagaccagtctcaatctcctggctcaagtgatcctcctgatttagcctcccaaagtgctgggactacagacatgagccaccacacccagtcaagtccaaaatctttagcaaggcatgcaggccctcatgtcctggcttccactccacctggcagcctcatctttcttcactcacccttctctgacatctatgctgcaaccacacccacctaccaggattagggtaaggcaagggaagcactcgcctcaggggcaaaattaaaaggggcaacaaaaaactcagtgatcaagacaaatgttattttaatgcaatattttttaaaaaatcaaaatcagtgcaaaagatccatggttaacagataccagaagttaaaataaagacatgatctgccctgcactcacatgttccagcctcacctgccacagtcgaatcctggccccacctactccttctggtttaccaaactgtactctttctcacctcctgtgccactttccctacctagaagactcccctgtaaatcatccttcaggcatgagctgtgatgtcacccttttcaggcaagtcttccttgacattcacaataactacccacacacgcacatgcacacacctgggactcaagcccctactctgtgctcccgtaacaccctcctagtattcactatatgcgatcacaattgcctggctgtctccctgacccatctgtaagctccatgaaagtggaggctgaacctctactgttgctgtcaccactgtttccagagctggtggcaatggttgggattatggctgcagcgacagctcctctgaaggctgcctgcaccaagtcaggctgggcccacacggagacagatccctgggaagtcttgatgggctggggacctcatgcaggctgctggctcctccacctgaaaccgcatctacagatgctgtgagattagggttgatggacctgaaacactgaaggagacactgacagacatccaggaaacacagaagtttgggtcccgacgtgagagagacagcagcccaaaggaccaggtgtcattttcagggacaggtcagggacggctattttttttttgccagcctttctctgggtggtctgtgcctgtccatttattcttgctgggatattttctgtctcgcagtggtagtggtgaggcagtcgtgacaaggagcctggctgggtggggggagacagagtcagatgcaggtagaccagcaggccttgtgcattccccgcttccccagcccacctccctcccactcctcaggtttgggtgattacagccaaggatgacagctcttgaaacggagagggactaggacaaaagtgccgagactttaataagataaggtgggaagtcaaagggagaatggggctgataagcctgggccatctctaccacaaagcaccaccccttctcctcctaaatcgcctgcccctagtcctcctaccaaccccttgctaaatttaccagaagagacatgagctagggcttgggctttagcccaatatatactccatggtattcacttagcagccaaggtggctgattaccccagggaaatatgaactctgggaggaaagataacgagacaccgaaggatgttcctccataaaagaaagagtatgacacccaacaacctgcactccactgacaaagactctctcctcagccaatctccagccaggctcctctgaaccctcttctcgtccaggcctcaaccaaacgctcacagggtttcttttttcttttcttttctttctttttttttttctggggatggagtcttgctctgtcccccaggctggagtgcaatggcatgatctcggctcactgcaacctctgtctcccgagttcaagcgattctcctgccttagcctccccagtagctgggattacaggcacccaccaccatgcatggctaatttttgtatttttagtagagatggggttttgccacattggccaggctggtctcgaactcctgacctcaggtgatcctccagccttggcctcccaaagtgctgtgattataagtgtgagccactgcgcccagcctgttcacagggtttctaacagctcaaggccatatccctaggatgaccctgggcccacttaaagtgcccacctgagaaaactcaaggctgccaaaaagatttactgtttttttcagccaacacctgaagacaatatagagtctctgtctcccgctctctgaggaaggacaggatcctacctcagtaactgccagcctcagccacaggtgacctagttgcatttacacagtctgcatttttcacttccctaactctgctaagcttctgctttcccatccctatgccctctctgtctcttaaaacacctgttcccctctgcacaaatcaaagaatcattcagttcttgcggaactcttttccctactgcaatagttattgctgattaaaatctggcctcaccactttaatcagtgtccagctttgtttatcgttgatattcagaataatttatgacaagcataataaataaacacaaaaacatgaaaggctactgactaagccattataaacaagatctaattagaaatttggagaatggaaatgagaatgatggaaatatagagctcaatagacgggctgatggtagagtagaggggcagtgagtcagaaggccatgtgtttcttcaaaataagacccattgatcagcatcccctgggaactcaccccagaccgcctgagttagattgtgcctttaacactactcccgggtgaagtgtatgcacagtaaagtctgagaagcagtgatatggttctcagccttgactgcatactggagggatctgggagctttaaaaagtacttacactttggtccttactgtcagagagcttctgagtaagtagcttggggtatgaaactgtaaacgttcccctggtcattttaacgtgcagccaagtttgagaaccactgacttagactcttagaaaagggatagggatgcaaaatgtaaaaattacaggatgtggggcacagaattagaagaatcaacatatataggacagaagtcctacctggagagacaaaagaaaaaggagaagagggaatactttctgcaaaaaaaaaaaatgactgaaaatttccaagaataaaggaaatgttcaagaccgtatgatgatatattgaaagaactcatagagtgccaataaggaaagatttttaaaaattcacacagaaaaatataggctgagtgtggtggctcacgtctataatcccagcactctgggaggccaaggtgggaggatcgcttgaagccaagagtttaagaaatattacattgatatttgggaatattaaggacaaagagaaacctttaaaacttcagagtgaagaggtagataccaagacaggaaaaagaactaaatgacagatgtctcaacagccacacccaaatgtcattttggtcttttcatatatttaaagtagtgaagagaaaaaaaaattaactcagcatttcttatccagttaaactatcatttaaaaatgagggtggaatatccacagtggtacaaggcctcagagggtttgccataaaagaccacctctgaaccacctgtgtcagtccgggtccatgggtgaaacagagctggaagctcaagtgctgcagtggggaaatggaggagaaagatcaggcaggggcggcaggggagcagctcacagactgttccttcggcccaggctccaatatggctcagcacagtgctgttgctgatgccggctttatttaaatatgtgagatttgattcattatggattttgcattaattttgatttttcaatattatttgtctttgattgctcagttttttgatacccccttaaattttgctcctgaggcaaatgccccacccacctgaccctctaggcctctacgatagggatatttgcaaaaaaaccacctcagttaatcaatgctccaacccaggcaccatccaggttcatggttcttctctggttgtgaaaattaaaaaccgggccaccacccacttctcagccttatccccagccagccagcagagcattgtagaatgtgagcttgcattgtgaacactctgaaaatgtaggccagagaaccttctggctggagatggctcctgctgcgagaagggaatatgacagatagcataagatattacagtaattttactgacaaagcactaagcatatcacaaaagaagttcaaaatcaattcatctgcttccaagcagaagcgagtctaacaggcagtgaagcatcatcttgataatgtagttgttccaaaagaagaaggaattaaccaggctaccctaaatgtgtctgtatgacatgcttttttgtttctgttaccctgataaggacttaaaattccatttgtatggaaataaactaagcttccgaagttatcttcctgttccggggagttatctcaggaggtttgctgcagaatttttctctgactaaatgggatcttaggctcagaggctgcaaggtttcagcttttgttgttaaatagtaaagcacactctacttccagccactacaactgtgcttctttaagggcggtatccattaaggttgtttgattacaaacaaagaaaactggctctaagcaacttgctatccttccaacaagttctttttctacttaatattaactaaagaatcagctgagcaggttaaaattagaatgggaaccgtgcagcgcattgggtggtagaaaatagttgacaactctctcagagtttattcattccaacaatagaacccgctgcaaccattcttttctgcattctctacaattttttcattttttttttagtatgatgttttgctatctagcattctcccctcaagactgaaagtcccaagaaaatgagtccaattgtccatgcttgagtcatatgcccatgctagggtgacaatctcaccaagatgttccttagtgagtgaggaaagtttgccaaagagacatggcagtgctgttccaagaaaagaaagagctgggtgctgggtgggcaaggaccacagaggaactaagaagagaggctatttctcctactgtcccatctccaaagaaaaggaggaagtaaaaaccgaaaaataacagactgattggcgccagtggccaggcctgtaggttaaagattaaaccccacccaaaccgcttgtgctatctatagatcacagacaacggtatgaagaaatacttgcattgctcaccacccccacctagtcacgtaccccatgcttgctggatctatcatgaccctttcacgtggaccccttagagtcgtaagcccttaaaagggccaggaactctttcttcggggagcttggttcttgagatgcaagtctgtcgacgctcccagcagaataaagcctcttccttctttaacctggtgtctgaagggttttgtctgtggcttgtcctgctacatttcttggtttcctgaccgggaagtgaggtgattaagggacagtggaggcagccccttaggcggcttagccttgccctgcggagcatccctgtggggtactccggccagcttgagcaatgtggatcctgagagtgctcctgggtaggcatttgccccagtggaatgcctcatcagagtggtgcatggcaggcccccacggaggatcaacacaggggctgaacactgggaaggaactggcacgtggagtccggacatctggaatatggtaggaccggtcccaggaacttacccaccccatttgagtggaagcatggcctgatcacccatggtgtgcccttattggcactttggtctcagttttgattttgatttggctcggcttgtttgaaaaaaaggaaagtgaaagtgagtgaatgcttgtttgggatgggcaacagatagacagtggttgccgtccgaagtgagtgttgagccctgagctgcagttccgtaggatacctcgtacagctaagtggcggttcgtgctggtgcctggtaccagcctgcctaagaggatctgagattcccgcaagggaagtggccagtgtcaggcgaggcaagtgagtgacccctttaccctttcccttcttgtgttgtgagcattgtttttgtctggcgggggtgagggtggtggagatgggtgagacgcaaagtaagcccactccattaggaactatgttaaagaatttcaaaaaaggttttaatggagattatggggttaatatgaccccaggaaaacttaggaccttgtgtgagatagattggccagcattagaagtgggttggccatcagaaggaagcctagacaggtcccttgtttcaaaggtatggcacaaggtaactggtaagccaggatacccagcccagtttccatacatagacacttggttacagctggttttaggccccccatggtggttaagaggacaggcagcagcagtactaatggcaaagggacagacagccaaggaagaatcctgctccacccgccaagggaagttggctcctaaagtcctgtccgacccaacatcagagaattcatggcaagaaatggtgccagtagcccccctctttcaccaagaaggaaggcctccccctcctgagtccactgagcctgagcttccacaagacctacgtacccctaggccacccagagtagaaaagaaaggatgcgagaccttgggagaaacccctcggttggcagcccgtttgaggtctagaactgggatacaaacgtccctgagagagcaatggtatactggggtagacaaggatgggcatatggtggaaaggcatgcctttgtgtaccaacccttcaacgctgccgatctcctcaattggaaaaacaataccccatcctatactgaaaaacctcaagctataattgatttgctccaaactattatccagacccacaacactacttgggctgattgccaccagttgctcatgtacctctttaacatggatgaaaggcgaagggtgctccaagcagcaactaagtggctagaggaacatgttccggctgattaccaaaaccccaagagtatgtgaggatccaattaccaggaacagatccccagtgggactcaaatgaaagacagggtatgcaaaggctaaactggtacagggaagcccttctggaagggttaaaaaaagggagctcaaaaaaagggagctcagaaggccacaaatgttaacaaagtctctgaggtcattcaaggaaaagatgagagtcctgcacaattttacgagagactatgtgaggcctattgtaggtgtactccctttgatcccgacagccctgaaaatcagcgcatgattagcatgactttagttagtcgaagtgcagaagacattagaagaaaactacagaaacaggctgggtttgcaggcatgaacacttcagttattggagatagccaaccaggtgttcgtgaatagagatgtggtaagctgcagagagaaccgcagagagagcgaacgccaagcctggtgaaataccaacctgctagccgcagctattagaggggtccccccaaaggggcgagagaagggggccccgggaaaaatacccagtctggccatccacgtttgcagtgtaaccagtgtgcttactataaggaaatagaatattggaaggacaagtgcccccagttgaaagggaaacaaggtggctctgagcaggaggcctcagacaaggatgaagggaccttgttcaatctggcaggagggttaccggactgagggggaccgggctcatgtgcccccaaagagcccatggtcaggatgacagtcgggggcaaggacattgggtttcttgtcgatactggtgctgaacactcagtagtaaccacccccgtcacccccttatccaaaaagactattgatataattggagccacagggatttcagcaaagaaacctttctgtttccctcggacctgcactgtggaggggcataaggtaattcaccagttcctgtacatgcctgactgccccttgcctttactgggaagggacctacttagcaagctgagagtcactatctcttttataaagcacagctctttacagctaaagttacctagaatgggagtcatcatggcccttatagttccttgggaggaggaatggagactcttcttatctgagccaggccaagagataggacaagctctggctaagcggtgacgaacagtgtgggtggaagataaccctccagggttggcaatcaaccaggcccccatactcatagaattaagtctggggcccagctggtcaggcaaaagcagtaccaggtccccagagaagcccttaagggcatacaggtccatctcaagtgcctgagggcctttggaattatagtcctttgtcagtctccatggaacactcccctcctacctgttcccaagccagggaccaaggactacaggccagtacaggatttgcgcatggtcaaccaagttacagtgactttgcatccaatggtacctaacccgtacacattgttggggttgctgccagctgaggacagctggttcacctgcttggacctaaaagatgctttctttagcatcacactagcccctcagagccaaaaactgtttgcctttcagtgggaggatccagggtcaggcgtcaccactctgtacactgggacccagctcccccaagggttcaagaactcccccaccatcttcggggaggcactggcttgagacttccagaagtttcctgccagagacctaggcagtcaggtgcaccaagggaatggataccctgtttcggcacctggaggactgtgggtataaggtgtccaagaagaaagctcagatctgcagacagcaggtacgttacctgggatttactacccaacagggagagcgcagcctgggatcacaaagaaagcaagtcatctgcaacctgctggagcctaagaccagaaggcaggtgagagaattcttaggagctgtagggttctgcagctcctaagagctgtggatcccaaagtttgtggatctcaaattttgcagtattggctaatcccctgtacggactcacaaagagaggagataaggaaactttcaaatgggggtcccaacagcaacgagcttttcatgagttaaaagagaaactcatgtcagccccagccctggggctacctgacctaacaaaaactttcacactgtatgtgtcagaaagaaaaaatgacagttggagttttaacccagatggtggggccctggccaagaccggtagcctacctctccaaacagctagatggagtttctaagggttggcccccatgcttaagagccttggcagcaactgtcctgctaggacaagaggcagataagctaactcttgggcaaaacctaaacataaaggcccccccatgctgtggtaacactaatgaacaccaaaggtcatcattggctaacaaatgccagactgactaggtaccaaagcttgctctgtgagaatctctgcataaccattgaagtttgcaacaccctgaaccccgccaccttgctcccagtgtcagagagcccagttgaacataactgtgtagaggtgttggactcagtttattctagcaggcccgacttccgagaccatccttggatgtcactagactgggagctgtacgtggacgggagcaactttgtcaactcacaaggagagaggtgtgtgggatatgcagtggtaaccctggatgctgtcattgaagccaaatcgttgccccagggcacttcagcccagaaggccgaactcattgctttaattcgggcctcagagctaagtgaaggtaagactgtaaacatttacactgactctcagtatgcctttttaactctccaagtgcatggggcattatacaaggaaaaaggcctattgaactctgggggaaaagacgtaaaatattagcaagggatcctgcaattattagaggcagtttggaagccccaaaaggtggcagtcatgcactgcagaggacgccagtgagcttccaccttgatcaccttggggaactcctgagctgactcaggggctcaaaaagcagcatccaccccctcccgggcatcagtcacagcccccctgctccctcaggcacctgaccttgtacctacttactctaaagaagagaaggactttctccaggcagagggagggcaggtgatagaagagggatggatccggttatcagacggaagaatagctgtgccacaactgctaggagccgcagttgtactggctgtgcatgagaccacccacctaggccaagagtcacttgaaaagttgttaggccagtacttctacatcttgcatctgtcagccctggccaaaacagtggtgtagcagtgtcacctgccggcagcacaatgctaggcaaggtccaactgtcccacccggcatacaagtttatggagcagcccccctttgaagatctccaagtaaacttcaccaagatgcccaaatgtggaggtaacaagtatttgctagttctaatgtgtacatactctgggtaggtggaggcctatccaacatggaccaagaaagctcgtgaagtaacccgtgtgcttctccgagatctcatccctaggtttggactgcccttacaaatcggctcagacaaccggctggcgtttgtggctgacttggtacagaagagagcaaaggtattgggatcacatggaaactacatactacctactgaccacaaagttctggaaacgtggagtggatgaatcagactatcaaaaatagtttaggtaaagtgtgtcaagaaacaggattaaagtgggtacaaggtctccctatggtattaagattagatgtaccccttctaaaagaacaggatattccccttatgaaatattataccataggccccctcccatactacagggactccgaggcactcctcgagggctaggtgaaattgagttacagagatagctacaggctttaggaaaaattacacaaacaatttcagcctgggtaaatgagaagtgccctgttagcttattcttcccagtttaccctttctctccaggtgatcgggtgtggatcaaggattggaacgtagcccccttgcggccatggtggaaaagaccccagaccatcatcttgaccactcctacagttgtaaaggtagagggaatcccagcctggatccaccacagccatgtaaaacctgcagcacctgagacctgggaagcaagaccaagcccagacaacccttgcaaagtgactctgaagaagacgacaaacccttctccagtcacacccggaagctgactggtccacgcatggccaaagcataaggaaactcaccatgagactcattttccttaaattttgaacttgtacagtaaggacttcaactgaccttcctcagactgaggactgtacccagtgtatacatcaagtcactgaggtaggacaaaaggttgttgcagtcctattattttatagttgttatgagtgtaccgggactctaaaaggaacttgtttgtataatgctactctatacaaggtatgtagcccaggaagttaccagcctgatgtgtgttataacccatctgagccccctatgactaccgtttttgaaataagattgaggactggcagctggggaaaagctgatatgagtaaataactggaacagaagagaaaggagccccaaaaaaattatcttaaaatttgatgcctgtgcagcaatcaacagtgacctgtatggaaataggataagatgtggctctctagattgggaaaggggctatatagtagaaaataagtatgtttgtcatgacttaggaatgtgtagtgatgaatgtagttactggtcctgtgtcatttaggccacctggaaaaaaagataagagggaccctgtccaccttcaaaaaggaaagagtaactcttcctgcactagtggtcattgtaacccattagaactactaattaccaatctccttgatccctgttggaaaacaggagagtacgtaactctaggaattgagggaactggactggatctccgagtaaatattttaatccaaggggaggtccacaggtgctttcccaaaccagtgtttcagaccttttacgatgaattgaatctgccagcaccagagcttccacacacacacacacacacacacacacacacacacacacacacacaaagacaaagaacttgtttctccagttattaggaaatgtagctcattccctcaatgttacttcctgttatgtatgtgggggaaccactatgggagaccaatggccttgggaagcccgggaattggtgcctactgatccagttcctgacataattccagtccagaaggcccaaattagcaacttctgggtcctgaaaaccttgattattggataatactgcatagctagagaaggaaaagacttcaccatccttgtaggaaggctcaattgtctaggacagaagctgtataacagcacaacagggacagtcacctggtggggtctaaaccatactgaaaagaatcccttcagtaaaattcctaaattacagactgcttaggtccatccagaatctcatcgagaccggacggctccctctggactatactggatatgtagacacagagcctacactccgtcacctgatcaatggggaagtagttgtgtcattggcaccattaagccatcccttttcctattgcccgtaaaaacaggtgagctcctaggtttccctgtctatgcctgagaaaagaggagcatatctataggaaattggaaagatgatgagtggccccccaaaaggatcatacagtactataggcctgccacacgagcacaagacggctcgtggggataccgaacccccatctacatgctcaaccagatcatacggttacaggccatattagaaataatcgctaatgaaactggcagagctttgactcttttagtccagcaggaaacccaaatgagaaatgccatctatcagaatagattggccttagactatttgctggcaactgaaggaggagtctgtggaaaattcaacttgaccaattgctgtctacaaatagatgatcaaggacaagtagttgaaaatatagagacatgacaaagccagcacatgtgcccatgcagatttggcataggtttgatcctggatctttgtttggaaaatggtttccagctctaggaggatttaaaactcttgtaataggcataataatagtgttaggacctgcatgttactcccctgtatgttacacatatttctccagttactaagaggcttcgttaccatcttagttcatcaaaacacctcagcacaagtatacatgaatcactattaatctgtctcacaggaagatctagatagtgaggatgagaatgagaactcccactagtgagtgaggttctcaaagggggaaatgaggagagaggctatttctcctactgtcctgtctccaaagaaaaggagaaagtaaaaactgaaaaataacagactgattggcgccactggccaggcctgtaggttaaagattaacccccaccccaaccgcttgtgctatccatagatcacagacaatggtatgaagaaatacttgccttcctcaccacccctacctagtcatgcagacaatggtatggagaaatacttgccttggtcaccaccccatctagtcgcgtaccccatgcttgctcaatctatcacaactttttcacgtggaccccttagagttgtaagcccttaaaagggccaggaaccctttcttcagggagctcggttcttgagatacaaatctgccaatgctcccagccgaataaagcctcttccttctttaacccggtgtctgaagggttttgtctgtggctcgtcctgctacagaaccaattcttctcaagtcagatccacacttttatgaacactgaagttctgaagtttcccaacaacaaaatgtttggaaaatgcactttgtacagtgtctgatacaacacgcaaaatcttatcatcttcaccatcatcagctaatgttattacttagaaaatctggccgagtattaataaaggtggggtgtttactgtgggaaagtgaaggctgtcttgaaatggcttttttctcaatagaagaaataaaaaagggtggctgagagtggtggctcatgcctgtaatcccagtactttgggaagccaaagagggtggaccccttgagctcaggggttcaagatcagcctggacaacatggcgaaaccccatctttacaaaaaaatacacaaattagcttggtgtggtggcttgtgcccatagtcccagctactcatggggctgaagtgggaggaatgcttgagcccaggaggggatcaagaggttgcagtaagccaagattgtgccactccactccaccctgggcaacacatttagactcagtctaaaaaaaaaaagaaaagaaaagaaagaaagaaaatacaaaagcgatgaaactggttattgttggtatccgcttctagagagccctggattcctgctgcagcctgtgggtcactgccccgccacacaaaggaccatgtatccattaggcaagatgggcacacacttaggggcacacaagattttttaaattagaagaaaaaaaatgaatgtttaaattgaagaaaatgcataatggtatatatttgtctttataccaaagcagttgcaaaatttaaccacaaaagtcataatgtagccccaagtcaccccccacccaccgtggaatttgtatgctctgtacaggagagcaagggctaactttactcccattcctgaccaatgatcttcctccagctcacatgggaccttgctgaatcatccccagtgcttttctctgaagtgggatctaaagttgttcacaaattctgcattcttttcttttctaaaaactctacttctgtgacagactacaaatcctgcactctttattcaataaatattaatttagtatttagtattacacatgcagacgctctgcaaaatactgggacaaaattggccaagacaggcttagtttttgtgcttatggagattaaagtcaaattgtagaaacatgtaatcaatgtgcttatcttactgggctgtaattacttagtaagtagaggaatatatatctatgtctaagattttctacatttacactgatcatagcatatataacctaccccctgaacttgacatttgcacacacacacacaaacacacagagttcagacaaatatgttgtctcttcttctgtaacttttcccccaaatgcctatcctaactacccccatgaagtcccctgataaaaacccttattcaaacaagtccagaagacagaattctcattgggacccccaagaacagaggaaagaatagatgaatggatggtgttaaattaatatgttaagaccctaccccccagatggatggtattaagacagtgggtctttaggaattaattaggtcatgagggtgaaactttcatgatgaggtagtgccctataagaagagacatgcaacagcttcctctccacaatgtaagaaaacctggaccctgctggcacactaatcttggacttctcagactccagaactgtgaaatgtttgtttaagccacccaatctataaggtacttttgttacagccgcccaaacaaactgagacaaatggatggatggatggatggatgaataatagactgaatagaggaataagaggtggacgggtggagggaagaaataacaaggatgaaagaagatgaacagagagatcgaggagtggatgcctagataaatacatacataaaagaataaaaagaagatagaaaatgaaagaaaaaaatgaataactagaaagatggataaattaatatacatatagaactttgacagtagggataaataaatgggtagaatcccagcactttgggaggccgagacgggcagatcacgaggtcaggagatcgagaccatcctggctaacatggtgaaaccccatctctactaaaaatgcaaaaaattagccaggcgtagtggcgggcgcctgtagccccagctacttgggaggctgaggcaggagaatggcgtgaacctgggaggcagagcttgcagtgagccgagactgcaccactgcactccagcctgggcgacagagccagactccatctcaaaaataaataaataaataagtaaaaaaatgggtagatggaaggagaaagcaagaactgatttggggaaaaagggaatgaagggatgtgtgaatatatatattatttaaaaaattatagagaattcagtaagcatgaacataagggtgaaatgagtaaatggatgaatagatggacaattagataaatgaacatagtgatgggctactaaatgggcagatggaagaatcaagtaatgcggtaagaagggatagatgtagggaaagtcgagctgatatttggaagggcagatatatagatgaataggagggtgatgcaagatagatacactgatgactgaatggataaatgaacacacaaataatgggtggccaaagtaacacggtagaaatagacggagtttcatttggtcaggtacagggaatggtagatttgtgggtacatgaatttatgagtggattgcatgaataactggatgagtggatagatcaatggatgatgaattggtgaatgaagattcaataaacaggtgggcatatgagcatatatgagaagatactgtatttaatgtgatatactagaatgtggaacacaaagtgttatgttatagcttggcctaatcctgctttcaactctttggggtctgactgcctcagaaaacatctgaggtaattagctctgtaaaaccttgaaagcagatgttcatttggactgcagtgacacaggaagattttatagggagggtggcatattcaccaaagtgaagaaaacatggggctgaagggagctgagggccccatcttttcctcctcaggatgaagaagtcctcacctcctatttctctgagacaatttgtctggcagagattatcactgacaaattgtttgttgttaattaaataacaaaacaggtggggtgggaagatattctgcaagttctcagatattccctttttggttgtggcacatatgtatgtattcatccagttagattcctgtttagaagggcctgctctgtgccaggtcctgggcatgtccccatgtggatgacaggaaagagtaagacaatcactgcactgcactgagtcccagagcctctacacctagcagccacatgaccctgggcatgctccctatctcatgtcattgtcatagcaaccccatgaagtaagtactacgaccatccagtttcaaagacgagaaacctcaggcacaatgggattggaacacataaaacactccctgtataacaggcgctgttttaagtgtccaaaaacattagatttttttgttacttgctgtaggttacaaaattcgtcccaatcccccactctctccctgactttgtgattttgtaatgtcactgcagcaattcccatcaagagatggcatctatctccttaattcttgaatcagatctgactttagccaacagaatgtgggagatgtgatgttgtgccaattccaaacctaagcctcaagggacactgagggtttttctgtctcttggaccctgatgttgccatgtgaaaaaattcaagctagctcctagaggatgaaaggttttatggatgagaactctggacaaccagtgacaaatagctaacttccagacctgggagtgaaagccttctagaccagtcagtccccagatgaccctcaactgactacaacatgtaagtgagcccatctgagatcagctaagctttgcccagataagcagaactgcccaactgctctccagactcgtgagctagactcatggctgttgttttaagccactgagtttggagtgatttgggagacatgacaggaacctataaaggccacataagtttgaaagagagataaacttaaaatgaccaagatacgaatatatgggagcacaaaaaaaggaaggaattctcctccacaagggaatcagtgaggttcctggagagggtgaagttgggatcaagccttgagaaaagtagagtcaagtttctgccaggagtgtctgcagggaaacctaagcgccaaaaacccacccaagagcctcagacaaataggtgagtcgggctttctcccagccaccagaatcaagacttgtgtaggcaacaagctggtcaggacaagcagcacaacatctctacttcggggccagactgctggacatcaagctacaatctaaaacacccagccaggggctacgccctccatctccctgcttctctcacccctgcactcaccaaatcccttatcctcccatactcccatcagcattcataacagctcctgtcaagagccatgcgctccagactcagggaaatgctcaaagccatgttcagtatcaaaatgagacagaagaaattatgtttaattcaacaaggaagcaactggctttggagatgagatgcggtgggcaagaagacgggggtagctgccagctgcagttaccacaaacaggtgctctgtgtgcagtatataccatacaccagccacggggctactgactctctgggaaggaacacacagccagctactgaatgggcagctgcagagggagctaggcatgatatctaaactggctttgatcaaaaagatatacatactcatagtttaagaatcaagtacacttacaagacttgctacaaaaatagcagccttctgcctctctctattcctcccaccctcaactcccagagacaaccacttgcaacgtttagctgattcatctgatattaccttgatatctctgaaatataaaaaaggaccaatatagtgtgcttttagttttaggtatcatctctgatcttccataattggaacattcttctttcacagctcccctgcccccaccataccttactttccttcctgccagctttccaacgtgagtcttcttgaaagaatctctccagaccattcgacttgctccagtctggaccaatcaccctcatatctggtgcacagctgttgccctggggtctcccttcattctctacctgagaatttccttcacaactctcttcagttagatatcctgcatttccattctctgtttttcacactcccctgatttaaaccctacttttggtggagcacatctcctaataatttgatatcaaagagtacatgagactttaatgtctaagaaagccattattcagtccttacatttgcttgatagcttggctggatgaagatttctaggctgaaaagtatcgtccttccaatcttccaaggcattaaaccaacactgtcttctagcttccagtattgctgctgaaatgtttcaagccattctgtttcctgatcctttgtatatgacacatctttttttccttcctggaagcttctagtatcttccctttgtccttcgtataataaaattttatcatacaacaaaaaagctataaaaagaaacattcagagaacaagaaagtattgaacattaaaaattgtagaacatgaataaaaattcctaccgaagtgttggatgacaaatatttaaaaatctacaataaaggtcaggcacagtggctcacacctgtaaatcccagcactttgggagactgaggcaggtggatcgcctgagatcaggagttcaagaccaacctgaccaacaaggtgaaaccccgtctctactaaaaatacaaaaattagttgggcatggtagtaggtgcctgtgatcccagctactcgggaggctgagaatagcttgaactagggaggcagaagttggagtgagccaagatcgcaccatcgcactccaggctgggcaacagagcaagactccatctcaaaaacaacaacaacaacaataacaaaacaataaaacagagaggaaaggcaatctgaggacacttctggttgtgctgacttctttcatgtaacaggctttcctcagctgtctggagatcctgagctgtctgtgtaatttaaggtcaggacactaacacactgattggaggctcaatcgcttgatgagatctatcaactatgggctttaccagagaggagtcatggggcattcccttaaagaacctccaatatcagtatctctggggaaacccaccaaaaagagagacctaaaaatttctctaaacccctgcctatagagtacaggcctggcagtcagcatcctggaagctgagtgtgagaagaaaaccaggggtcattcaatatagaaatgtttatataaccccattttcagtacagcatccctgctgtctttcatgcctagtgtttcatcctctctgagaaaatatactttctgctttttcaagcctcatctttacctccacttccagaagtacctggaagtgccaatttccgagcctttagtggttcttcagtgtaaatcaggttgcttctcagcagaccagagaaagctgactcctaagccagagtggggagaagcaatcagttcccacttgtccatgtgcttttcaactccccaaatttccacgtttttgtttcctctccctttttatgagtttacacatatctatattttaaatcttcttactttctgtttacgctcagaactgcactaatatgctagttgatgtatacattcaatgtttacgctcagaactgcactaatatgctagttgatgtacacattcaatcagccatctatacctagaacctaagctggctttcaaccaccaaagaaatccatacttcccttttagtttcctaagaccaaccaaatacccttcctatggaaccataaaagagagaaaagttcccacaatatctcactctgggccgtagtagatgataatagctattgtttgggactgcccagctccattccctttctgtggttgggcatataatccacaaataatcaatcatagcatctcattacccagggcagtgattggctcaggagtggacatatgattcaaccaagaccaatcaacatcctttcctgggacaaatatacagatgttgggaagagcaactgcaatataaaaagagtttctaagatgaaaagttgttaatttggggctgccaggggctatcttttcaacacatagaaaacgtctatctataatgaggaaaaaataaagccaagcagagatgtgtgagagagaaagtgcgtccaaaagagaggcaaagagaatgctgatggcatgcaaagagcaaaaacagaaagagaaggggatctggaataagatgaaaagaattttgtagcatggacatggagactggaaacagattttttagaatgggaaacaggggaagaagcacaaaactaacaacatgaaaatagatgaaagtataaaactcactgtaaaggtaaaaatgtagtcaaattcagaatactctaacactgcaatggtggtggatacataatttttaactctagtgtaaaaatttaaacacaaaagtattaaaataactatagctacaataatttgtcaatgggtatgtgacatataaaggtgtaaattgtgacattaatataaaatattgggggaagagaagttaaaagtacaaagcttttgtatgaaatgaaagttaaattgttatcagcttaaaacataatgtcttaactataatatgatttaggtaagccttgtggtaaacacacacacacacacacacacacacacacacacaaaaatctgacatagatacacaaaagataaagagaagggattgcccctacaaaaagtcatatcacataggaagacagcgagagagaaagaatggaacaaaggaagtacaaaatagtaaaaaaaaaaaaaaaaaaaaaaaaaaaaaatggcaatattaaaatcttacccatcaaaaattagtttatatgtaaatggattaagttctctgatataaaaatacagagtggctgaatgaattgaaaaacaagattcagataaattctgcttaaaagagacagtttagctttaaggactcaaagacctgacttaggctttcagtccatgcctgaaagggatagaaaaatatatttgatgaaaatgatagtcatgaagtccttgcccatgcctatggcctcaatggtattgcctaggttttcttctagggtttttatggtttttaggtctgacatttaagtctttaatccatcttgaattaatttttgtataaggtgtaaggaagggatccagtttcagctttctacatatggctagccagttttcccagcatcatttattaaatagggaatcctttccccattcttgtttttgtgaggtttgtcaaagatcagatggttgtagatgtgtggtgttatttctgagggctctgttctgttccattggtttatatctctgttttggtaccagtaccatgctgctttggttactatagtatagtttgaagtcaggtagcgtggtgcctccagctttgttctttttgcttaggactgtcttggcaatgagggctcttttttggttccatctgaactttaaagtagttttttccaattctgtgaagaaagtcattggtagcctgatggggatggcattgaatctataaattaccttgggcagtatggccattttcacgacactgattcttcctacccatgagcataaaatgttcttccatttgtttgtgtcctcctttatttcgttgagcagtggtttgcagttctccttgaagaggtccttcacatcccttgtaagttggattcctaggtattttattctctttgtagcaactgtgaatgggagttcactcatgatctggctctctgtttgtctgttattggtgtataggaatgcttgtgattcctgcacattgattttgtatcctgagactttgctgaagttgcttatcagcttaaggagatttggggctgagacaatggggttttctaaatatacaatcatgtcatctgcaaacagagacaatttgccttcctcacttcctaactgaataccctttatttctttctcttgcctgattgccctggccagaacttccaacactatgttgaacaggagtggtgcgagagggcatccttgtcttgtgccggttttcaaagggaatgcttccagtttttgcccattcagtatgatattggctatgggtctgtcataaatagctcttactattttgagatacgttccatcaatacctagtttattgagtttttagcatgaaggctgttgaattttgtcaaaggccttttctgtgtctactgagataatcatgtggtttttgtcattggttctgcttctgtgatggattacatttattgatttgcatatgttgaaccagccttgcatcccaatgataaagctgacttaatcgtgtggataagctttttgatgtgcttctagattcggtttgtcaatattttattgaggattttcacatggatgttcatcagggatattggtctaaaattctctttttttgttgtgtctctgccaggctttcgtatcaggatgatgctggcctcataaaatgagttagggaggattccctctttttctattgattggaatagtttcagaaggaatggtaccagctcctctctgtacctctggtaaaatttggctgtgaatctatctggtcctggacttttcttggttggtaggctattgagtattgcctcaatttcagagcctgttattggtctattcagagattcaacttcttcctggtttagtcttgggaaggtgtaggtgtccaggaatttattcatttcttctggattttctaatttatttgcatagaggtgtttatagtatcctctgatggtagtttgtatttctgtgggatcggtggtgatatcctctttaccattttttattgcatctatttgattcttctctcttttcttctttattagtctcactagcggtctatcaactttgctgatcttttcaaaaaaccagctcctggattcattgattcattcaaagatttaaagtgtcgactttaaatctttcctgctttctcttgtgggcatttagtgctataaatttccctctacgcactgctttaaatgtgtccctgagattctgctacgttgtgtctttgttctcattagtttcaaagaacatctttatttctgccttcatttagttatttagccagtaatcattcaggagcaggttgttcagtttccatgtagttgtgcggttttgagtgagtttcttaatcctgagttctaatttgattgcactgtggtatgagagacagtttgttgtgatttctgttcttttacatttgctgaggagtgctttacttccaactatgtggtcaattttggaataagtgtgatgtggtgctcagaagaacgtatactgtgttgattttgggtggagagatctgtagatgtctattagatccgcttggtgcaaggacttcatgactaaaacaccaaaagcaatggcaacaaaagccaaaatagacaaatgggacctaattaaactaaagagcttctgtacagcaaaagaaactaccatcagagtgaacaggaacatacagaatgggagaaaatttttgcaatctatccatctgacaaagggctaatatccagaatctacaaagaagttaaacaaatttacaagaaaaaaaaactgcatcaaaaagtgggcaaaggatatgaacagacacttctcaaaagaagacatttatgcagccaacagacacatgaaaaaatgctcatcatcactagtcatcagagaaatgcagatcaaacccacaatgagataccatctcacaccagttagaatggtgatcattaaaaagtcaggaaacaacagatgctggagaggaattggagaaataggaacgcttttacactgttggtgggagtataaactagttcaaccattgtggaagacagtgtgacgattcctcaaggatctagaactagaaataccatttgacccagccatcccattaccgggtatatacccaaaggattataaatcatgctaatataaagacacatgcacacatatgtttattgtggcactatgcacaatagcaaagactggaaaccaacccaaatgtccaccaatgatagactggattaagaaaatatggcacatatacaccatggaatactatgtagccataaaaaaggatgagttcatgtcctttgcagggacatagatgaatctggaaaccatcattctgagcaaactatcacaaggacagaaaaccaaacactgcatgttctcactcataggtgggaactgaacaatgagaacacttggacacagagcggggaacatcacacactagggcctgtcctagggtagaagagtaggggaggaatagcattaggagaaatacctaatgtaaataatgatttaatgtgtgcagcaaaccaacatggcacatgtatacctatgtaacaaacctgcacattgtgcacatgtaccctagaacttaaagtataattaaaaaaaaaaagaaaatgataaacaaaaaagagccagggtggctatttttatatcagacaaaatagactttaagtaaaagaaaatgtcacaagagacagagaaggtcattatataatgataaagtggttaattcatcaagaggatatatgaattgcaaatatatatgcatattgggtgcacattggagcacctattaaataaaccaaatattaatggttatagagggagaaatagacaacaatacagtaatagtagaggattcccattttctttctttcttcctttttttttttttttttgagagagtcttgctctctcaaggtgggagtgcagtggtatcatttcagcttactgcaacctctgtgttccaggttcaaaggattctcatgcttcagcctcccaaggagctgggattacaggcatgcaccacaaggcccagctaatttttgtatttttagtagagacagggtttctctatgttggccaggctggtctcgaactcctggcctcaagtaatccatctgcctcggcctcccaaagtgctgggattacaggcgtgagccactgcaccaagccagtactcccactttcaacaatttatagataatccagacagaaaataaataagggaacagtggacttggggggctaatgggcctaacagacatatacagaacactccacccaacagcagaaaaatagaaattctttttaagtgcacatgaaaaaacatccaggacaaatcatatgttaggctacaaaacaagttttaacatattagaaaagactgaaatcatatcgattttcttttccaacaaaatggtataaaactggaactcaagaacagggggacagttggaaaattcacaaatatgtaggaattaaacaacacacatctaaacaatcaacaggtcaaagaagatgtcaaaagggaaaacaaaaaaaatcttgagatgaatgaaaatgaaaaaatagcatatcaaaactatatggcatgcagctaaaacagttctaagaggacaatttatagtgaccaacacctacataaagagaaaacatctcaaataagcaacctaactttacactttaaggaattagaaaaaaaagagcaaactaaggcccaggtcagcagaaagaaggaattaaaaatcaaaacagaaacaaataaatgaaaataaagactaggaaaataatagaaaacattaaggaaattaagacgtgtgtgtgtgtgtttttaagagataagcagaattgagaaaccattagatagactaagtaaaaaaagaaaactttcagataaaaaaatccttaaaattaataaaattataaatgaaagaggaaacattacaactgatatgacagaaatataaaagatttctagagatactatgaacaattatatgtcaacaaattggatagcctagagaaacagataaattcctaaaaacatacaacctaccaagactgaatcatgaaaaaacagaaaatccaaacagaccaataatgagtaaggaaattaatcagtaatcaaaaatctcccaataaagacaagcccagtaactgacggttttactggtgcactctaccaaacatttaaggaagaattaacaccagtccttatcaaatttttatctgaaaaactgaataggaggaagcacttccaaattcactttattaggccagcattaccctgatattaaagccagacattataagaagactactaatcaatatccctaatgaacataggtgtaaaaatcttccacaaaataccagcaaactgaatttaccagtacattaaaaggatcatacattatgattgagcaggatttattctttgaatgaaaggatgattcaacattcaacatacacaaatcaataaatgggaacccacattagcagaatagaggatataaaacatatgattatcggccgggcgcggtggctcacgcctgtaatcccagcactttgggaggccgaggcgggcggatcacgaggtcaggagatcgagaccatcccggctaaaatggtgaaaccccgtctctactaaaaatacaaaaaattagccgggcgtagtggcgggcgcctgtagtcccagctacttgggaggctgaggcaggagaatggcgtgaacccgggaggcggagcttgcagtgagccgagatcccgccactgcactccagcctgggcgacagagcgagactccgtctgaaaaaaaaaaaaaaaaaaaaaaaaaaaaaaaaacatatgattatcacaacagatgctagaaaaaaaactgacaaaattcaacatcatttcatgataaaaactctcaacaagtaacaaccatatacgacaaacccacagctaacatgacactcaactgtgaaaagtggaaagcttttcatctaagatcaggaacaagacagggtgcccatttgtatcacttccattcaatctaatactggaaatactactaagagcaattaggtaagaaaaagaaataaatggcatccaaagaggagagaagaaagaaattgtttatgtttgctgatgatatgatcttgtatatagaaaaccctaaacatgccaccaaaaaactgttaaaactaacaaattcagtgaagttgcaagatacaaaatctacatacaaaaatcagtagcaactatatatactaacaagaaagtacctaaaaacagaaataaacaattcaatttacaatagcatcaaaaataaaataataaatttaaccaaggaggtgaaaacactgacaaaaaattgaagatgatataagtaaatgaaaaaatatatttatgaattggaagaatcaatattgttaaaatggccacataatcaaaagtaatctacagtttgaatgcaattcctatcaaaattccaatgtcattcttcacagaaaaagtaaaaataatcttacaattggtatgaagccacaaaataacaccaaatagccaaagcaatcatgagtgagaagaaaaaagctggaagcttccatattgtttagaagttagaaatgaaacaaaacaaaaaacaaagttgaaggcatcacactacctgatctcaaaaatatattagaaagctacggtaattaaaacaacatggtactggcagaaaaacagaaacatagaacaatggaacagaatagacagtccagaaatatatccatatgtttacagccaatcttcaacaaaggtattaagaatacacaatggggaaaacatagtctcttcttcaataaatggtattggtaaaactgtatatcaatatggaaaagaataaaattggattataccatatacaataataaactcaaaataaattactcaaatataagacctggaaatgcaaaatgactagaacataggagaaaagcttcttgacattggtgtgggtaatgatattttggatatgacaccaaaagcacaggcagcagaaacaaaaatagacaaataggattatatcaagctaaaaagcttcttcacagcaaaggaaacagttaacagaagagacaacctacagaataggagaaaatatttgcaagccgaatatttgataaagggttaatttccaaaatatatgaagaactcaactcaatagcaaaaaacaaacaaaaaacaaccaaataactttattaaaaaacaggcaaagggaccagctgcagtggctcacatctgtaatcccagcactttaggagggcaaaacagcaggatctgttgagcccaggagtctgacaccagactgagcaaaatgatgagaaactgtcttttcaaaaaaagaaagaaaaaaatattagctgggtgtggtggagcacgactgtggtcccagcttctcaggaagctgaggtggaaggatcacttgagcctgggaggtcaagactgcagtgagccaggattgtgccactgcagtgcagcctggttgacagaacaagaccctgtctcacatatgtaaacacatggatatatgtctcaacataaaacaaacaaaaatcggcaaaggacccaatagacataaaaatggccaacaggtatatgaaaaaatgttcaacatcactagtcatcgggaaaatgaaaattaaaaccacagtgagacactacctcacacttgttagaatcgctattatcaaaaagacaaaaaattagtattggcgagaatgccgagaaaaaggaatccctgtactttgttggcagaaatgtaaattaatacagccactttgtaaaacagtagtgacattcctaaaaaaaataagaatagaactaccataggatccagttgtctcacttccaagtattgtgaaagttgattataaaaattgggtcattctactgaatgaaaacagagttgagaagccagagggggaaaacactcagggtacataacaccgctccaagaatataattatttgcaagcctggctgtgaaattgcctgtagtaacctgaagccagttttatctaatagctactgacacaacctgctgcaaatctaggactagttttaccatcaccaccactcaccaatcagagctttcttgctccccagaactttacaagtgccacgaactttcttgaaaaacaaatacataacatttctccttgttataaaacttccgaccttctctttgttctttggatacaccaaagaccacccagtctgtgtatatcttcccaattgcaatttttcctaaacaaaacatgttcatgtcagagattcatctctatagtttatttgacttcaacagtatatatcaaaaggaaatgaaattggtatgtcaataaaacatgtgcactctcatgttctttgcagcagtattcacaataatcatgatatggcatcaatctaagtgtccatcagtggatgagtggatagagcacatgtgagattgagatatatatatatatatacacacacacacacacacacacatatatatatacacacacatatatatacacacacacacatacatttatgtataatggaatactattcagcttttaaaaaaggataattctgtcacttgtgagaacatggatgaacctagaggaagttacgttaagtgagataagccaggcacagaaagacaactaccatgcgatttcactcaaatgaggaatcaaaaaagttgttgaggttttagttcaaaatggctgactagaagcagcaagcccatgcctctctcacagacaggaaccacaatggcaagtaaatcctcacacttcacatagatcatcttaagagagcatgctcggattcaccagagaaccaatgggacccaaggaaagcagggaacagtggagccaggcagcctgcggagctgggacggtgtggagtgaagagaggctcttactccaaggaaggggtgaatgaggtgagaggctccgggacccacctctccatcacagacttttacaatcctagccacaggagagcccccataatcctccttaggcctccagctgaacacagagccacccagaaactttgcagaggcaccgctcaagcccacctggaatcccacagtcagcctggtgccagctgccatgccaaggagggaggcgaggctctttgcacacccccaggagagacagcacagctgctgtgcagaggagctgccagaccacacaccacactactcccggcctcggctgcttcctgcgaaatggggcttacctgttgcaggccccctgtacagttgacccacccctgcagaaacactggccttggctaggtgtttctctgagaccccgactcccaggccagggagagagtgaggaggcctgggacctctgcatgaccccaagaacaaaatccagaactgcttctgcaggagcaaagtgtgagtaggtcatgtgccccccaggtgccaatctccagtgccctgaggggccctcccttcccccagtgaaaggccacctggctcctgcctgagcatttccgctgcaaccacagctcttctgagagcccagtccccacaggcctgtgctgccctcaggctcccaccacctgggccttctgtctgtcccctgcctgagggttctatcagcctctcagggaccagccagccccttccccatcacagccagctcctgaagtctagggtgccccaaccccagtccagccccttaacccatttatgcctgaggttgcaattttttaaatttttccaatcagaccttggcgatgatcttgagcagtgggatataaataagtcccacatgcttagtattccagtaatggaacactaggcataaatgggttttaaggacccatactctctgtccggtaggccgtctaagggcctgagaactggggcgctatgtagaccaatccaacagtgctggcacctaaccacttttcccagggcctgaggtcaggccagcccaaccagttgacaccaccacaactgatacccatccacaggggctgaaaggcagagtgtatcccctggccctgacaatgcaacatcattaccacatcaaaggaaagagagccatacgctgaaaaggttctgccccaaaaccactcctgtggagagtctcaagacaggtgtgttccacagctctcaacccactgtggcttggatgtagacaacagtgaggatctgaactgagagtcacgagttccaggactggtgtgattgggaatagatcactttcctgcctatctagcgcatggagctagtgcagccccttcacccgatgtagagacctcagcacatgtcactgggagctcccaaagccatctccacaaggcttggtgcctatacttggcattggagtatttgtgggcaagccagggggtccagctctgcccagctctacccactccctgctgaacagaaaactcagggcaccaggcacttcactgtccagcccatcaccagaagcaacagagagcacctcccagtaaacaaagaccaagtacctacccatctgctgtgccacaagctggctcttacccgtcagcgccatctactggcctgcaggttgaactgcacagccaaatataaagcctggccaatggaagtgcgtgggctatagaagcaaagctttagcaacacaacgtactccacagtcactccctagggaaagggagggatggagaaagaaaaaacaaataagaaaaaaaaaatcccatctgaacaaaaataaattcaaaaataagagtggttttctgtgagcagctgctccagatgagaaagaatcagcataagaattctggcatcatgaaaaaatctgaatgttgtgacatgactaaaggatcatattagctctctagaaatataccctaaccaaaatggaaactgagaactgacaaagagttcaaagtataaattgcaaggaaattaaatgagattgaagacaaggttgaaaaccaacacaagaaactataaaaacaatccaggaaatgatgggaaagataaatatattttaaaaaatgcaaaaggacttcttgaaataaaaagcctacttaagacatttgaaaatatagttgaaagctttaacaatggattacaccagcagaagaaagaatttcagagcttgaagactgatcattgaaactaatttgtcaaaagtaaaaataattttgaaaaccaaagccagagaaaccatatttctctggtgagaaatatgaattatctaaagcaataaaacctatgacttattagcattcctgaaagagaaaaagtaagccactggaaaacatatttgaaaataactcaagaaaattttcttaattttgctggagagttgaacatccagatacaaaaaattcagagaacatctgtgggattctatacaagatgaacatcaccaaggcatatggtcttcagactatgctaagtgaatgctgaagaaataaaaaatattaaaggcagctacagcaaaaactcaaatcacctagaaaggaaaattgatcaaacactggacttctcagcagaaaccctagaagcaagaatagattggaggcctatttttagcctctttaaataaatgcaaaccaagaattttacattctgccatactaagcttcataaatgaagaagaaataaagtcttccccagacaagcaaacactaagagaatttgtcaccactagacagatcctacaatacatgctcaaaggcgttctaaatatggaaatgaaagtactatactcaccatcagaaaaagataccaaagtacaaagctcacagatcctataaagcaattacacaattgaaactccaaaacaactagttaataacacaatgacaggagcaaaacctcacatatcaacattaactttcaatgtaaatgacctaaattgtacacttaaaagatacagagtggcaaattgggttataaaaaaaataagatgcaaccatctgctgtctaaaaaagacccacctactggctaaagacacattcagactcaaagtaaaagggtagaaaatgagatcatgcaaatatcatgcaaacagacactagaaactcttaaaaggaaggagggtggaaggggagtgaggactaaaatattacctgttggatacggtgttcaatatttgggtgatggaaacactagaagcccaatttctatcattatgcaggcaatacccttgtaacaaacaagcacatataccaccagtgtcaaaaattaaaatttttttaaatgaaataaaatttcaaactcacaaaagcaaagaatggtgtttgccaggtactggggatgggggagcaaaatgagatgttgctcaaagtaaacaaagtttggtagacagcatgagtaagttctgcagatctattgcaccgaatgtacaataataatgtatacttggaaactgctaagagaatagatcttaaatgttctcactgcaaaaaatgtgctagcttgatttaatattttcacaatgtatactgtatcaaaacatcacattgtacactgtaaagatatataattttatttgtcaattataccttaataaaattggcagggagggatgggtgcaagaaataaaggatatgagcaagaaatgaaaggcatctgtgctgggctcgacttttccaatgtattcacttgacacatcggtgacagtctcatgttctgacttttctgacactgtagtctggaaaaaactatcccctatatgcaacacagccattaaaacacacacacagacacacatacacacacacacacacgcagaggaacttaatacagtaatattcaatatcaccaactttgcctgttaccatggtaaccagcagcattaagtcctgctgctaaaatttcaagagcagatgacatgaactatttatgtataattgcattttataaagagaaagaacttgtctttcatataaaatatgactcagtctcagatgagatgggtgattatatcacattgccgtcagaacaaatgtagcaagtcccttgtctccacgccctctaccccagtgcatgttacttccatatgcaagtggaaagcaagatggcaaacaagggttagcctcccacagaaagtgcctgccctgatttgagctggcgtcactgcaaagacgctcagggttcaagtattcacttctccaaattgagttaaggggttctttttcatttctactcttacaagcttgtgcacctgctgtctgtcccctgtggttggcttgtcttgagccacagccacttgtataagtcatcagcatggagtggacatagaccaggtcaaaagccttcatcttgtagatagagattgagaggggtcataactagatgtttctggagacagggttgtgctcagtagtggcatccattcgccagcaatagcacaggcctaaactagttcagcattggatcatgttgatttttccctcatccggggattttctgcagacattctaatgtcaatttcgcagaccatcatccttcctgagccaagctatcaaggaacaaaaagagtaggtgttacctatgtggtgacagctcccacccttgagcactgagccttgttcctgagcattgcagcactgttcacagccaagtgaaccgtcttcaagaagccttcgtcactcatgtgttcaggaccaggaaaaaagcttattcaataactaagtaaggttatgtgattatctctttaatcatatctttaataagttttctgggaatggtagaggttttaaatgagaacgtattcaaccaaataacgttgagctccttaagggaagaaacaaattccatgttttattcaaggtgtgattccaattctgggtacagagacccccacaaaaacggctctgctctaatgtttgtgggatgggtgggaagatggacaacgcatggatgaaaattcccaaacaggaaaatatatcttgaatgaaagaatgaacgaaaatactggttttagaaaggagggacggatggagagattatcagggcagggaagatcccgaaggaaatgagcaggctttgctgaaagagtttcttgggcatgggaaagacccagatggggttggcctgccatttacccctctgcaggaaattcctccaggccacaccccaccttctctgattttctcagctgccgaaccttgattgagctgtgttccctgttacaatgccagaattgaaaaagagaaaacaaatgagaaaataaatcacgataatttcccctgccttaacaagacacttgcattcacgtactgtgtgcctaagaagggcagttaccagtgcagttctgtagtgaaaaggtttcttgagccagagaaagacccagaaatggatccttggtggccatctggacaaagcccttaatcagtcacctatgatgcccacttgctagtcctgcatccaggttcatgggaagtctgcagccatgacaggctctgcctggggttggccctccaccaaagagcctccggtccctgcctcttggggcacagacccctactgcccccagcctactgacctgccccaggcccctgcagtctttatcatcaccgcatcgtgcagtttgggtggcatctggttctaaaatgttcccaggcttctgccttgcttctcaggtgcaccagtcttttcacacatgggtgggcttctctgaagctgctgcagttactcccagtggccaaatcatttcttacttcccttaataaacaaggcaacagggttttgatgaaagagtttcttctttggagggcagaacagcttccttgccttgattaaaatgtttgccagctgtttctcattctggtctcaaggtggcttaaatcttcaggaaagtcagacacttcactcactggtaattatttttccttattaaaaatctatttgcctccatgtgaccaacatgctactctccatcatgatgttgagccattcccacctcttccatccatctccactccaatttggttttatcatctgatcccaccaggtaagagaaagcaattagccctctgcccttgaagtttgaccccgacaagattaatccggttcctcggagtgtctgaggacctggtgaaaacaagcagggccttttgtcaggtctctcctcacacctgtgaaggtctctgttcatgactatggggcatgacagcattcacagcacaaaacacttcatcaacattctaagtatacccttgcagctcaaaattgtcagcacttgaaggttttcctcttcagagatggtcttatcacaacagcactgtgtggtcattctcctgagtgctgctgccctgcagataggtccaaagcccaacttgcagagtcacttcttcacgttgcggcccaagatgcacaggacttctgaggtgctgaggttgaggaaagaccggatacaagaacacctcaagaattttgtacccagagggcagagcccagacataaatgttttaaaagaaagacgattttccatgatcttggaaatttctaggtcagactgctttcacacctattttggaaaaggggcctactccatccctgcatcaaccatagcaaagaaagtcaacaaagaccaaaaatatatctgaatgaatgggttttcattcattctttcaacaatttattggttgattactctgcatcaggcaaggttctagatgaaggcactagagcctctatttaatctgaatttatcttttcaatacatgagccaaattctgctgactgggaagcactaatgagacaattaaacagaagtctaatctagagtgactggggcggtgctggttcactttgtttaatcagggcaggctctttaaggaagcccttgaaggcatacatgggagagcctgctctcccttgctgggcctggccacctctaccccatcctcctctaaaaacagcgttttcaagatcaaagaggctaaactgacaccactgtcaaaatctaattaaaacctctcttcttctagtaaagatgttaacactggataaagcagatcttcatccccaacaaaaaaagaacttgttttaattaaacatccaattttaagttggttttattgctattgttgtgtttttgtttccatttgtgccagacagaggacaggaagactgtaatctcttacaaaacatacgaacatatgtcctagatggcaagatccctaggcatcttcctctgaagtcctcagtcgcactctcactcacagacatctgctggggtggagggactgtcaaaaactttttcaggtaatctggtgagatgtattcaaagacttaaaagtgtatctttttttttttttgcacttgtctttaattatttccttaatctctggaaatggaatttatctgcagtgaggttcattatagtgccatttgcaaagctgaaaggctggcaacaacctaactgtccagccacaggggataatgacgcattcatctactggggcatggggcacgagcccatgagaaggtgacatgatttacaagaaatctagaatgtgctgttgagtgaaatggtatggaccagtatgatcgcattgtcattgatttttacctgtacattcataagctcgaagaaatccagacagttaaatctcaaaatattcagaggagtgacattgtggaagatttttattttctcagcaacattttcttattttacaaacatcacatatatgacttgagtaattttttaaagttaatgtttaaaagagaacaaaatagttgcccagagtaaccctgtcttttaagtatacctcctaccccaaagtgggcagtaactggcttgtctggcacccatgggtgatcttgtctaagcttgctgccctgttcttagggtcgggggctacctgggtattaacttgagtctgtggattgctgtgaagtcattgagaaggaacacaggccctcccagagtgcaggcacacttgaccatgcagtgcccaccctgccaggactcatgggagaaccagccattctgctcagctcccggttagtcagtcccttccccgctcaatgtttccaagcacccaccctcagtgcatttactgagagtcccctgaccatcagacaaggactgtccacaggccgtgagggagggaggggcatcaccgaggctgctgggcctgctttcacattgcctgtccgtggcatggaggttcctccctccctgatccaccccttgttcccctgcccatgtgaacgctgggattgggcctgagaaagaaggaaaattgcttcggcttccaagactagcctttctcatgtttgtcttgagtgtatttctgagcagaaaaacaagcttcacaaacctcatgactcaccttcatgttttctgtatgcttccctctcccctgccttgtctcactgatcccttgaggctctccctccccagcccacatttactccatagcttccagtagagtttttcaggttccctgcaaagtgcaaatatacacacaattctgtgagtcaggcagtatcttaaagaggttccatcacacccgaaggtttggagtcactagcctgtttgtgacatgtcttcaaggatgaacgaaagatttgaactcttcagccttaaaataataaataaaacctgaaaatgaaaaacctcaccaaattaagcttctgcccattttagaaaacaagggcaaccacggaggagatgactcagttcttaaagacaaggttacccaaatgggtgcattgtgggatccaagaaggatgcttctgagcttgttgagctcagcatcagcacagacatctagctagtccgagaactcagatagggaccaggctctgtcctggtgggttaaatcttaaatctctatgtagcccattactatcagcaaatggatctttatttaagctctgatcttgtattgtgtgtatatccttctccccagctctgagctctctgagaggacagcctacagtttttccatttctatctccagggcctactcccaaaagatgaaccttcaactgtctacattgcacgtctgggccttcagcatcgctgatgcgccagctggcaccagcttcagcagcccagcgcatctgctgtgcttgcatctgccatgtcatcgtggggtcctgggcccctgaatgcagcaggccagcttatgtggtcccatcctctgcatctctgtctgcctctgcagtgcagacggctctgaagtcacaccagcctaacttccaggcccagacctcagggggagccagattgccatatcattcctgtatccagatccagatttttcctgctgcctctgttcttcctaggccgcccctgttattcaggccatctcgtcccactgccaacatgagcaccaagaactacatcattccattgctttcagcattccctccatcaatggtggcaccgtacacagctgtgtctgtgtaaaacaagagttcccctgcctgaagtatgtggggggccctttgctgaaatattttagctcagattcttttagaagaagtttcactcttttccatgaggacttttctttcatcctcaggcatcaaatgcccgttagaaagttctcagttttgcctgcatgtcaatgtttctaaacagtctcatttttattcctgttgttgtgaaataaatgccttaatgtcccccttgcccatactgactgttacaatctgcctggccatgcctcgaccttcccagataccatgcacctgtcccccttgcccatactgactgttgcaatctgcctggccatgcctcaaccttcccagataccatgcacctgtcctacgccataattaaaatttactgcaatcttagctttgtcatctggaccgtgccatataaaaagaaaggcacaacctcagaatgtttttccttctaaattgctgtaaaattatgagttatgtcaactacaataaaacttcaattattcagatgcactaggggaacatgaccaaattttgaatgagtgaagcagctttacaaaaaagcagaaggtgcgtaaggaaagaagcgagatttcagagcttctcatttctgctacaggacaatcagcctcgcgctgcagcagaggacacaaggaacccacctcggagtaaatcagagagcacaccacaaatcagctcccctgatagggtaaggtggaaatacactactggagggaggcctctctcctgtgcccatgtgagatgttggctataaaccccatcctggccagagcagtgattttccactaggcaaatttaaatgtgtgttattgtctagtatgtgagataacaaaattgaagataaactttcactcaccaaaaacttgccatatctcaagtagagtgtcctccctctttcttgcccacatctcaccttcattctagtcatgggtgcttataaaccctattctgttagagacagaaagggttaacaagcaccatgagccaacacaagttcaagatatcatatacttttgattgtctgttttgaaaacgtttatgccgagggaaatgttaaagcaggtgtccgaattagaacaagtgtccatgtaatacaagaagatggattttggctaccaagagccacaagagcagagacggaaccaaaggcaagatgacgtgtcatgagttacaaggaagcagaaggcaagccacccacatctcctttagttctttaggcatttaatcagctagaaaagctggtgcctgctgctccactcccagtggcctatccattatcactaaaataataatgacaaattgagaaaggcacagaggacaggcaaatgtgaagccaagtgttgaagacggcaacaggaggtgacagccagcagccctcaaacaccagaaggagccagtgtcggccttgggggcctcctcctctggagagcaaagccagctgtctacattcatagcccaccagaaagggcagatgagacaaggagggctgcaggacagtgacaaagaattcaaccccggagctgcatcagccctaaagcagccttgcctcatttctgcctgagtaagagcaagccctggaatcacagtgaagggattacattagacaggacctacgttagacaggagcaggggctctgacacctgggcttagctgggagctaagggggagctgccctctgcaggctggctcaccagactcacctgcagagttggccactcaaatggctatctagagcccagcctccgcagctgtccagcagtcccctgcttttgggttgcagactctagcacccaaattccagaatcctctcttgtctcatgagctcataggttaaggtacagcctggtttattatcctgcacaaaatcctaatgacttaaattaaacaacaacaacaacaacaaaaaacagaaaggcccaccaagcacccagaactccctggagctccagcttcttatgtcctaaatatcaaaacatcatcttgtgacttcattattctctgtgtttccattctttctataattcccttcccaacaaccttcacccaggtaactcctgctactcctgctcttctgcagagaccaccttgcataccacccctcctctcccgttacattagaggcccagttgagcattttattttacctttgggacatttattcctttattcactcagcaaatatttattgtgcatctactagtcataggcacagagctagacaatggggattctgccatgaccaagaaagaaacaaacagtccatgtcttcttggagcttgccatctaaaggggaagacatcattaacaagacaaaacaaacatcgtatgatagcatatgatgctagatagcatattaaatgctagatagaaattaaatgctagatagcatattaaatgctagatagaaacagcacactgagctatgagaaaacagcacatgctggacctgaggtgaggccactacaactgaagcactactgtaaacttacacagttttccttcccagtcccaccacctcctgacaggaagcactctccacaaggcagggccccatgaccagcagctcacaccacagcacagggcaccaggcacgatgaagggtcggcgagggcaggggctcttcacccagaagactctgaactctggctttccttcaccttcctctgcacccagttgcacaatttgttcctcataattaatccatttgacaagtgagaaaactattttcaaagtaaacaaaataaatcaaaatggtgctaacttctctccctaatgtcctccatcaatcatggatgactcgagctttttaaacagagaaactggggcagtggagggagtgaaaaaagttttaaactcaactgtgctcccaactctataacattaagatgctggaattgatttgttgttaaaaggagagttgcaagtactatctatgcctagaaggaggagggaaaaaaatcaatagtaaaccatgtaattgggagaggggtgaagtagaaaagggtatattccctactgactcagagaaaaacgcaacaaagagtcaaaacaccctgatttaatgcctaacttaaggctgcacaaggcagagcgacagtgccaggaagatgtagaagaaggaagtgttaacttgaaatgactctcaccagcctctaagggcaggagctgaactgtttgctgaaaaccaaaaattcacaaaggaatagtgggaaaagaggaaacaaggatagcataggtcctccagagaaagacagaagacagagcagccagccttccaaatcggaagtcacatgctcacctccacagtgcctgtaaacaactttttttttttaagtttttatttatttaattttgagacagggtcttgctctgtcacccaggctggagtgcagtggtgtaatcatagctcactgcagcctggaactcctgggctcaagcaatcctcctgcttcagcctcctgagtagctgggactataggcacataccaccatactaggctaatgttttaattttttgtagagggcgggctctctctatgttgctcagggtggtctcaaactcacggcctaaagtgattaccccaactcggcctcccaaagcattgatattactggcatgagctaccacacctggctctttaatttttgtacagtgtattgctatgttgcccagactcaacttaaactcctggcctcaaggtatgctcccacctcagtctgtcaagcgctgggatgacattcatgagccaccacaccaaactgcttaaggttttgccattcaaattaaaaataaaggcaggcacactaggatggctacagtaagaaatatggacaattgccaggtgttggcaaagatgggaagaaatcagtgggaatgtaaactggtgcaatctctttgggaaacattctggcagttcttccaaaagctaaacagagaattcccatatgatcccagcaattccacgcctgggtataaacccaagagaactgagaacatatggccagagaaaaacttgtacatatatattcatagcagcattattcataatagccaaaaagtggaaataaaccaaatatccatcaacaggtgaatggataaaccaaatgtggtacatgcacacaatggaatattcacatataaagaggaataatgcactgatacatgctacaatatgaaggaaccttaaaaaatgctgagacagtagctggacataaaagacaacatattgtatgattccatttatatgaaatgtctagaagaggcaaatccatggatacaggagttggcttagtaactgtcagggctgcaggaaggagagtggaatgagaatgactgctagaagtacaggtttcttttggggtgatcgacatgttctgggattaaacagtgctgatgactgcactcctttgtgaatatactaaaaaccactggattgaacactttaaaagaattttatgatatatgaactacattttaataaaaagaaaataagggcagaacatatatggtaggaggtggttaacctacttgacaaatttatctcatcatcataaacaatacagtaatcattaataagatatatatttaataaatcatgcccaatttagcaacaccttgaagtagatggtttgaggttaagtattatggccctgaaaatggtaaaaatattacttttgaaacattttgtagtatcaaacttttaataaattctatctggcttccaatagctatgtacattaggcaggtattatgggctgaactgtctcccccacaaaattcttatgttgaagttataactcccagtaccttagaatgtgactgtgtttggagatagggcctttaataaagaggtaactacgtaaaatgaggtcctgtggttgggccctaatctgatacgagtggtgcccttctaagaagagattaggatgcaaacaggaacaggggaaagactacgtaaaggacagggaaaagacgacatctacaagccagtaagagaggccttgggagaaaccaccctgtcaacaccttgatctcagactgccagcctccacgactgtgagaaaataaacctctgtggtttaagccacccagtctatggtactttgtcatgacaactctaggaaactaatacagaaggcgttcatgtgttaaattcagatttaactctatatttattatatgctgaagcatatgatagtgaactaatagagtgaactaaccattacaagagctattccattttctaaaagccatcattaagcatttaactataagggtccaccgccaaagtaaaacatattttttgtttttttttagagacagggtttcactctgtcaccctgcctggagtgcagtggtgcaatcacggcccactgcagccttgaactcctgggttcaagtgaccctcctgtctcagcctccccagtagctgggactacaggtgcataccaccatgcccttctaattatttttactttttttctgtggagacacggtcttgctatgttgcccaggctggtcttaaacttgtgacttcaagtgatcctcctgccttctcctcacaaagtgctggtattacagacatgagccactatacctggcctaaaattctttttagaaaattaaaatacttttgtgtgtgtgtgtgtatatatacatgcatactttaaaagaattttattatatatgaattacatatacgtgtgtatatatacacacacacacatacatacacacacacacacacacacacacagtagaatattactcagccacaaaaagaaataaagcactaatagatactttcctggggtatcaacgtgggttgctacaacctggaagaacctcaaaaacattatgctaagtgaaagaagccagtgacaaaagggtacatactgcattattccgtttagatgctctatcaagaacaggcaaatccagagacagaaagcagattagtggttaccaggaggtggagaaggcagaaataacgagtggttacttaatgggtacagggtgtttttctggaattaataaaaaagttttgaaactagagacaattgatgcttgcacaacatttagtgaatatcctaaacgacactgaattgtacactttgaaatggtaattgtatgttatatgaatttcacctcatctaaaaaatcatactcctaccagtatagcaggatacctcttcccacacaggttctaagaaaataatcagctaagtgtacagtcatgcatgggtaaaagtgtttgttttagcatgtgtattgttaaaatgttttataatagtgaaaatttgcctaatgttcatcaaagagtagataaataaatcagagttcatctatatattggaatactaaacaaccgataaaaacaattaggtagatccacacaaaaaagtcccttcacttagaagcatattaaattcctaagtgctattaaaaatgtaactgttggccagtgaaaatgatattacacacctgaggacttgccacctgtcagtagaaggcaaagctgaactgtgttctgtcccagctttatttacatggctttgttcacgtggctgcagttcccagagcagtgcctggcacacagtaggtgctcaataagtcttagatggatgaatatctaggaagaaccattaaattttaagttttaagaggaagttctgtagttcatatatcacagacattgcactttgtcaataagtagaaagaagattacaaacaatgtatctggaaagctgccattctgagaaatatagacatatacatatgtaatatgtgccaagaaataagtccggagacatacacattaaaaagttaacagtgattatctttacatggtgatattataaatgatttaaaaattttcctttgcatgttgtctgaatttttcttttaacaataagcatagactacttttctaatcaggaaaaaattgaaaaagcaataaagctatttccatgtagaaaataaattccttttattatctataattcaattctgaagactattaattgggcatgctagatgctttcactgatctgctttggttgttctgagttctaaatccatttagttctctaaaataaacaacttactcaaagaaatccaaacctgctcagaaaataccaacattagtaatgtccagccacaccacaagcactggtgggccactgttggtccaattattaagaatctgtctgttttgggtgcaataagcaataggctcactcagtacctatgaggcaccaatagtacctgctactgactaactggccaaagcccccagagtgtcatgagaggggagaaaccatccagtcagtcaataatcacaggttaatgaaagaacactccaccagcttgctatccccgaagaccagaaagctgctatgctcttcagaactcttaacaaaaacgacaatgacaaaaattgttttccttgactctcaccttgagaacaaaagactaaacccaagtacaatgacacaatagagtttcttgtatactgttttcatttctcagtgtcacttctgttttctgtgactcttactttgggagtaaataagtcatttcctccaggatcctgaactggtcatacataaaatcttcccggcaggacaagcctcaggtgggcagggagtctgtgaagtagggagtctcaatcccatctccttcagaggccagtgtggctcaaacttggggacctcactcatcgaagggatatgaggcgaggggtgcgggtgggtagcctgcgccagacctaagggtcccactgcctgtcagctcctgacatgcctgactcagggtccaggagccacatcctccaggctttaagcagacaatggaaattctgatttttatgtaaacgcctgtttttgttctcttagccactaattagattttttaaacactatgcagtccaaaccaagaacatctatgggccaccagtatgcgacacctgagcatttgaccttgagtttgatactgactccaggcctttctactcctggcaagtcacctaaacagaggacaggtcattatctgaggacttttggacttgaattcccttttcatctttatttcatgagtttcctcataaaactctgggggagacgcccctcttaagactctgctgttgtttggaaatcacatcgattacaacccacaatcaattttcccctctagtcaactgcaaaataggattataggtcctattcctagaaagggtgcttagaaaaccattagcagatgttcacaacctgcattcccctaccccacattatcctggattccaacaaagacaggggagccagagtagctctgaaaccaggcctgctggagcgggaagtgaatcacttcccttcagtggcccaaaaacctggcaaagaggaatgatgccttggccccaacagccactgcagaggctggctcttaccccactggaaaccttcgtgtccctcccctacatgcctacccctcagtctgctgccctgcctctcctgcatttctctctactccaaaggttcccgtgcagagggcacggaggcaatccagactccctctctggccagccccccaggcttccagggcactaaggagcaaacacaaatctccctctaagctagaaggacggggcaggatgggtccaccctgcccatccgtactggattcggtagaaatgaagtccatgcacatgtgccatcttccttgtagtagtcctcataaaagctctgagagaggtttcatgtcctttttacagaaaaggagatggaggcttagagaggttactttaataagagagagagaagccttcttagagaaggtgaacttccaactagcatcagaagtcccggcaagaacttgaggggcacactgggagaacagtgagtttccccaaacttagctttcccaaagcacccctactagagcccacgaagtcctcaacactctagccacatgggctaccatgggaggctctagggagtttcggcacagaggataggctccttacaccacaaccaaagacttcagagccggatgaaaggcatgatgggagaacacggtcagccccatagcagacggttggagatgacagcctgaaaaccaaaacagcccacaggtgcttaaagaacacaggccctgcctaaaaagagtccattagccctactgctcctgtccaggttacttcacacacacatgcacatgcagatgcatgcacacgtgcgtacacgcacgcacacacacatacacatacacactcacacatatttcttgcagcaggcaagaaataagggagacttgaatgaagtgcagcagggggcctgggagagatgcctgcaggaaattgctcagagaagaatgcatgggattcagcaacccagaaagctgcaggtagagattgagggaaggctgtcagagggagaattgacttttgtttaataacagcacatccctacagagctgttcttcctgtgtcatgtttagacatctagtttgccctttgtgtggctatctgacccacaagcatctccatgtttggagctagatgaaatgtcagcgctggaaacattgctctgagaattttctgcataagaattatatttgaaattgtatatatagatgtaatcagcaagaaagagggtatagaggagagggggataaaagcaatgaatgatgccagcagcagaaacagagactgagtctgggaatctcctactgagtacctttccaataaactcctttctgcttgttaacgaaggcaaagcggtttgaaaggagaggaccagagtagcggtggagacctcaaagcagaaatcgctaataaccactgcctttaggagagccaaaccctcaccatttttattcttcagtcattctgctcaggaacaagctttcagggagtttggctgggtggctgcagtgatccacagacatgtcactcgaagtgcttccttggatcacagggaagtggccaatgattgtcccattttacacaagaaaattaaatggtcagacccagatgacttggcaagaccagggctaacaaatctgggtcccaggttccactgctgagaagcaggtcaagggcagtgcgtgcttcctggcctgggcccttgggacactgccataggctgcagaatggttttgtgttacagggctggaagtgctatgatttttttctaaaaaaacaacattacataacttcgcatgctgtgaaaacattcatttattttacatcttcatttcacattgttgcaatttaattttattgttactgatatccttctatacattaatctaatacttcatttggtccaagaagtcagacactgtgaattatgcccatcacccaaaattttatccaatttaacaaccttgatatgatttagaatatctttaagataataataataagagataaaaatgtttggaaaaaccccaagaaaaaagatgccagggtatgtttgatagcctaagtttgcatcacctatctacctcttggccagaagagaaaagaaaaccttcagtgaccatcctcccaacaccgtatccaatgagagaggaaagatatttcctcttagtaaagtcagggtgctttaccacgtgaccttaaccactcatacagagacagctacactgattttggggccagggtattatgtgtgagcttacctgtgactacttattcaagaaagcattctcagcagaacccagactgccttctccttcccatcttctcaaatccacatagagacaagggaaggtcaagtgtagagcaaacgcttaggggatgtgttgggtggggccatgctcaaagttcagtgcaacgcacaaagaactcattagtgattgccaagtgaacaagcaacaaccaaccatgaactcaaaatactcttggaaagcttaaaaatataccccccttggggatgagggattccaaaaactcttgggaggcaggaatcctgctggcacccccaatgcgctacagccatggcccactgtaataaaagatggtccctaccgtgcatctgcactgcctaaaagcacctgggagaggaactttccacctttgacaaaagtaggtaggcttaatgagttaatgttttcaaatgttttctgagctctttgatgggagcagctgtgccactacaaagcagcctttcatctccaggacagaaatagtctctctctttctaccccctctatccagctaagcctaaccaacctcagcaaagccaccctctccaagacaaaaggaaagggaacagctcacgcagaatgtaggctctgatcctgtcttcctttgcctaatgcaccctggctaatttttccctaatggtatcatcagtggcacatgcggccctgctgcaatgctctgtgccatctgaacaacaggagaaacccttctgctggaaagtgaatgcaaacagattctaatcaataggaagagctcaattagagcaagttcagcacacttcaaaggtgttgctactttctcgctggcttatcccacacagcccttttgaggggctcgaccttgggagctggctggcaacaagagctgctccagacaactctgtaactggaccagcaaacttcccaccatactggatgtcttctacaagccagaagagggggaaaactccttatttcagttcagagccacatttctcctcctgcacaccccagcacctccctcaggacactgagggcaacttagtgaagacctgtgccttggccactggtctgaaaggccctgggtatagcagtgcacagatcatcacaaccacctgcagaaagtcagctgcttcttcaatctgcaaggaaaagactccttcccaagagacctctggtaatgaggtgttaagagtataagagctggggaagtgaggcagaacaggaaacatggcccaaatgccaggcactgttttctgggttcagatcttggcactaactacctatcagctgtggaatcttgcaaaggttacttaacaatcctgcagctaggtgctattgtcatctctggtttataaaggaaacaaaggccgaggtgggcggatcacttgaggtcaggagtataagacctggccaacagagtgaaactccatctctactaagaatacaaaaaaatcagctgggtgtattgctgcacacctgtaatcctaggtactcgggaggctgaggtgggaggattgcatgaactcaggaggcagaaattacagtgagccgagatcataacactgcactccagcccaggtgacagcgagaagactgtcttcaaaaaaaaaaaaaggacaaaaatcctctcaatatctcaaagccttaggaagaaagaaaactatttagcacagtgccaggtgtacagtaagtgtttgataaatgctggctaatgatatgccttctgctgctgttagtaataccgatgtgttggaaaatgttgagaggaactctgaaaaagagctagcggccagaattttcaggaaaagctgcctacatcctcctctttgagtttcataaggcacatttctgtggtactttctcaggacttttattgtgttgaagacaagtttgagaaacactgacttaaataaatttatatatttttgctacaaagaatatctgcagatagatcaagatggccaactagaggaatctaccactcatctccttcacaaaaatgacaaaaacaacataaataactgcattttgagtagagtacctaaaggaaaacactggaagtgacaaaaaccctctgaagcacgaaaatctggaaagccagcatagggagggaagcgaaacacctgaccaggatctgctcagggccaagggaaaggtaagcaggggatcccccatggtctccatagttactgaggctgcctgcaatcccagctacaggctagccccgcagtccccataggccctgagcccagtggaggaaactacctggagtccacaaggtcacattgctccagagaagggacacatgttctccacagtgggacggagccactgggggagcgtattctgccctggaggccattagcccctatatatacatctccatgtcgctgggtccctgccgtcattccactgtgcccacaaaaaaggctgagtgctgtgatcccagctagacttgacggtgcagtcatcatccctgcccccgagcccatgcagtgctctacaatccagggagcaggcatagcacagaggggaggatgccccagaactaggggagccagtgtacatgctgagcagagacctagagctgaccacctcacatctgccgccaccaacaacccctccaggggcggaggtgctgcacatgtgtgcacatcctccgggaactaaagtgcagccagtccagtgattgccatcacagaaagccatacctcctccagaggtggagctgtgcatgccatgtgtccacaaggagcggcccacctggtgcccaccaatgcgagtaaccccacccactccagggccagagccaccaaatgccatgcacatcccccagaaactaaggagtgacctgttcagcagtgccagcagccccacccccaaaaccagtggagccactgtgccaggcacatccccccagggcctgagaaccaccttgtcctgcaacccccctcaatcacaaacaatgctgcaccactgcctttacaaacacccgcaatttaagattctgaggaaatctcagacactgctggcattaattacagtcaaagaaatcagacagggactacactatgatgcccatctagaacaaaagccaaagcaccctacccaacagacaccataggaaacatctataggaaaaggtatttctccacaaaagtaactccatatatttggaaggcaagactatactccaccagatgtgcagatatcaacgtaggaatgaaagaaacatgaaaaaacaagtaaacataacacatccaaagagcacaactctccagtaacagaccccatagaaaaagaaacctataaaatgcctgaaaagggattaaaataatatcaaggaaactcagtgagatataagagaacacaaaatcagaaaaacaatttacaatccaaataaaacattcaacaaaaagatataaaacagaaccaagcagaaatcctggagctaaataactaaatgaatgagataatcaagagcttcaaaaatagactgagcaaaagaaaaaaaatttctgaacttgaagacgagtattctgaaataacctagtcagaccaaagaataaaaagggtgggaagggaattaaaagaatgaagacagtgaagaaagcctacatgacatatgggacaccatcaactgaataaatattcaaaatttaggagttccagaagtaaaagagattttaaaaagctattcaataaaataatagctaaactttttttttgttcccgcaagatggtagattggaggcttttaacacgcctcagccacttggaaatagcaaaatagtgagtaaagatcaactctgaagagttttaattcaagaaggaaaatgtgaattcaccagaatagtgaaggataccccaaatcccattgagaaaaaggtaggcaagcagcccttgtgatagtgtttggctgataaacatgagtgaagcccctgtacataaaaagggcaaagagttttcctctatgactcacctttccacttgggatctgtgcaacccatgccaagaaaggggaccctgattctcccaaaccctggaactaccaggaggagaggctgggagacactgagagggaaagatattggaaaatgctgcatgcattttcccaaccttggaccacggggaagatgtcatttttaatccacactaatacaaagtcagtcattgtttggtgacctaacaatgcagccacgcaggcattttagtctcagactagagactggagcacttgctttggagtggagtagaagcctcccagctgcaatggagcagctagtgtggaaaatgccccagcagtaggcactggaattgggcaatctcccaccacaggactagagtgggaagagggttgctgaaactgtggtttcctctgagaggtgagacttgcagccaagagcagctttgtgacctggaactggtctgtgtgtcattgcttggagtcccagcattctcccccgagaccatggtgtagcagggccctctatgctctatgcccaggcagatatccaggcatttgaagcacccacttccctacattagcagcctaagctgcctcacgcttgctaagcagagaatttggtacagtggggctctgcttcacacccaggcagatttccaggcttaaggagtacccatctgcctggattagcagtctgagctacttcatcctttctatgcagagaccatggtggagcagggtcaactccactccttgcccaggtagatctccaggcatatggagcatccacttggctggatcagcagcctgagccacctcaaccttcttctgcagagaccatggtgcagcaaggctgtctctgctccacagtcagagatctccaggcactcagagaacccactcacctgatttgcttcttgagctgcctaccccagtttcctacaaagaccttattgcacaaccaattactccactcctcaccagtagatatatttccaggcaatcaaatacccactcacctagattagtagcctgagctgtctctccctcccactgcaaagaccttgttgcagcgacagtttttccagggcgaactcccaagtatgcagcatgcttgctcccctggataagagcctgagccacccctctcttcccatgctgagatcttggcgcagcagcacattctcttccccatgacgggacatatcaccaggccttcagtgcacctgccccccggaatagaagtatgaactgttatactcttaccacacaaagaacttagtacagcatcactcccttcacttcacattcagatataactccaggcatttgtcacacctgctcccatggataaggagtttcagccaccctttgtctcatgtaaagactttgtagtggcagcagtctctctgctccttccccaggcatatcatctcacacggggcatacctgctcttccagagtaggagcttgacccactcctcccatcccctgcaaagaccttgtttgaacagcagtttctccactccctcccagagcatgtggcacatctgcctgccttaatgagaagcctgagctgcccttcccttcaggtgaagagaccttagtacaatggcactctctcagcttgatgttcagacatacttccaggcatttggagcacccattcttctagattaggagtttagggcattcccctctcccttccagaaacttggggcggggaaggttttccaattccacatctagacacatctctgagtccttggcagcttccactgcaaaagctggtgcttgtaactgccattaggtctgcctagtttggccctgcccatcttggtgcccctacctaggactgagcagggaactcagatcattgtgcattccaaagatcagccccttgcttgaggcaagagagagcttcctccactaaacaaggatcaagtatattcctgtcaagtttggatgcagccagctgttacccataagcaccacctactggcccggaggttgaaagataaaacataacaagaaatctgaaacaggtgcacagtactggggaacaagataagcttcctaagacctctactaccctggccagagaaggaggcaatgagcctgctcatatgcccaaaatatagttactgcaaccagcatttagcaaagttgccaaataaaagctatctaaaaccaaggaacttaaaatagactatttggtactgaagacacctggaaccaaagccataggaccctacataacaacatatattatggataccttcctcaggggtagaaaaaagatgccatccaaacaaaagcaaactcaagaaaggaaagatagtttatccacatgagaaaaaaccagagaaacaattctaaaagtatgaaataaaaaagtattacaacacccacagagtgaaacactaactctccagcaacagatcctaaccaagataaaatctaaataccaggtaaacaattcaaataatttattttattttgtacttttttgagatggagtctcgctctgttgcccaggctggagtgcagtggcacaatcttaactcactgcaatctccacctcccgggttaaagagattctcttgcctcagcctcctaaatagctgagactacatgcgcacaccaccacgcctggctaattattgtatttttagtagagacgaggtttcaccatgttgaccaggctggtcttgaactcctgacctcaagtgatccacctgcctcagcctcccaaagtgctggggttacaggcattagccactgtgcctggcctcagattattgattttaaagaagctcagtgaaatccaagagaaagctgaaaaccaacagaaaagaaatcagattagcaagtcaagacataaaagaagagataggcttcattaaggaaacagaactcctggaaataaaaaattcactgtagcagttataatatacagttgaaagctttaacaataggctagaacaagtagaagaaataatttcagagctgtatgataggtctttcaaattgacccacacagatgaaagaaagaaaggaaagaaaataatttaaacaaatcaacaaagccttcaagaaatatgttatgtaaaccagccaaacctacgagttgtaggtattacagaggaagaaggaaaaaaagttaaaagtataaaaaatatatttgaagaaataattcaagaaaacttctctggttttgtgagagattaagccatccaggtaaaagaagatcagaaaactcctggaaaacacattgcaagaagaaatacactaagacataaagtcataagactatccaaaggcaatgtgaaggaaaaaattctaagagtagtaaaagagaaaggtctaatcagctataaaggaaatgccatcagattaaaagcagactattcagcagaaactttacaagccaaaaaaattggtggccttttagcctccttaaaaaaaaatgggccaggtgcagtggctcacacctgtaatcccagcacttttggaagccgaggcgggtggatcacgaggtcaggagatcgagaccatcctggctaacacggtgaaaacccatccctactaaaaatacaaaaaattagccagacatggtggcgggcacctgtagtcccagctacttgggaagctgaggcaggagaatggcatgaacctgggaggtggagcttggagtgagctgagatcgtgccactgcactccagcctgggcaacagaatgagactccaactcaaaaaaaaaaaaaaatgccagccaagaatcttatatcctgccaagctaaccttcacagatgaagaaataaagtatttcccaaacaaacacggaggaaatttgtaaaaattaaaatggccttgcaagaaatactcaaaaagttctagacatgaaaataaaaggatacttgctatcataaaaggccatataagtaaaaatctcacagattctctaaagcaattatacaatttaaaccccaggggcaactaggcaacaacactatgacagaaacaaaacttcatatattaatattaaccttgattgtaaacggcccaagtgctcaacttaaaagatacggagtgggaaactggattaaaaaaacaagatccaaccacctgcagcctataagagacaacacctctgggctaaagacagctacagactcaaagtaaatgggtgaacaaagatatatcatgcaaaaggaaaacaaaagaaagcaagattagccatcctcatatcaaataaaaggaccttaaacaaacaacagttataaaaaagacaaataagagcattatataataataaagagcttaatgcaacaaaaagatacaactatccaaaatacacgttgatatgacttggctgtgtgctcacccaaatctcatcttgaattgtgtagctcccataactcccacatgttgtgggagggacccattgggagaaaactgaatcatgggggtggttcccccatactgttcttgtggtagtggataagtctcacaagatctgatggttttataatggaaaacccctttcgtttggttctcattttctctcttgcctgctgccgtataaaacaggccttttgccttccaccatgattgtgaggcctccccagcaatgtgaaactgtgagtccattaaaactctttttcttcataaatcacccagtctcgggtatgtctttatcagctgtgtgaaaatggactaacacacacatgcatccaacattggagcacctggattcataaaacaaatactactacacctaagaaaacagattgatagaaatataataatagtgggggacttcaacaccccactgacatgacaagacagatcactgaggcagaaaatcaacaaagaagctctggacttaaattggactatatagactaaatgaacctaattgtcacttacagaacattatatccaatgatcgcagaatatccattcttctcaattctgcatgaatgttccaaaactgaccatgtgcctgaccacaaagcaagtctcaataaattttaaaaacctaaaaatcatatcaagcatcttctcagaccacagacaaataaaattaggaatcaataccaagagaaatgctcaatactacacaagtacacataagctaaacaacttgctcctgaataacctttgggtaaacaacaaacttatggcagaaattgaaatctttttcaaaacaaatgaaaatagatacaatgcaccaaaacctagggcacagcaaaagcagtgctaactggaaagtttataatgttaaacacctacatcaaaaaaaaaaaatagaaagatgaaaattaataacctaacgtggaccctcaaggaactagaaaaacaagaacaatccaaaccaaaatctatcaagagaaaagaaagatcaagcagaactaaatgagattgagatcaataaaataatttatacaatgaacattccaactgataatacacaaaagagcatcagagactagtatgaacacctctacacacataaaatagaaaacctacaggaaatggatagattctgggaaatatacaacctcccaagatacaaccaaaaagaaataaaatcctgatctgacaattaatgagtaataaagctgaatcattacttccaacaacaataacaaaaaggcccaaaccagacatattcaaagcaaattttaccagatatataaaggagatctgttactaatcttattggaactattccaaagtattgaaaaggaaagatccctccctaactacttctatgaatccagtaacactctgataccaaaattaggcaagaacacaacaacaacaataaacacgacaggttaatatccctgatgaacataaatgcaaaaatcctcaacaaaaatactagcaaacaaatccaacagcacatcaaaaagataattcataatgatcacgtgaattttattccagagatacaaggatggttcaacaactgcaaatcagtaagtgtgattctttacataaacaggactaaaaacaaacaccatatgaaaatctcgatagatggagaaaaggcattcaataaaattcaaaatcccttctaaataataaatcctcaacaaattacacatcaaaggaacatatctcaaaataatgagaaccttctgtgaaaaatccacagccaactttatactgaatggagagaggctgaaaacattccctactagaactgaaggaagacaggatgtccactctcaccactcctattcaaggcggtactggaagtcatagccagagcagtcaaggcgtaaaaaaaatgaataaaatacaaattagaaaagaggaagtcaaattatctcagtcccttaatgatatgatcatatacctaaaaaaacataaaaactcctctattagtttggcagatttgagaagtgaagctatcaggtcctgggcttttctttgctgggaaactttttttgtaccctgaggtgcatcactggattatttgaaaactttctactgttttgatgtatgtgttaattgctataaaattccttcctactgctacttttactgcatcctataggttttggtatgttgagtttctattttcatttgtttccaaattttttttgatttccttaatttcttcattgacccagtgattgtccaagagcatgttgtttaatttccatgcatttgtacactttccaaaataccttttgttattaatgtcttttgtattccattgtggcctgagaatagacttgatatgattttgatgttttaaaatttgttgaaacttgtattgtggcctaacatgtggcctatcttggagaattttccatgtgctgatgagaaaaatgtgtattctgtagctgttggataaaatattctgtaaatgtctgttaggtccatttggcctaaagtagaattaaaattcaatgtctattgatggcctgtctagaggtctgtccaacggtgacagtagggtgttgcagtctctagctattattgtattagagcctaacttcttttttaaacctgttaatatttgttttatatatctgggtgccctggtgttgactgcatatatcttcttggtgaaatgactcctttatcattatataatcatcttctttgtctctttacagtttctgacttaaagtccattttatctgatgtaagtatagctacttctgctttgttttggtttctgtttgcatatttatttctatcccttcaattcaatctatgtgtgtcattaaaggtgaagtgactttcctgtaggcaacatgtagttgggtcctgttatttccttttttaaatcctttcagccagtctgtaccttttaattggaaaatttaatctgtttgaagtcaaggttattatttataggtgaggactgacctctttcattttgttaattattttctggttgttttgtgtattttttgttcctttcttcctttcattttattctgataaaagattttttttaactacagatgcaattccatgacttgttaatggtctgatcaggatttctatttcttcctggttcaatcttggggggctgcatgtgtcctagaatttatctatttcctctgggttttctagtttgtgtgtatagaggtattcatattagtttctgatgttcttttgtatttctgtattatcagttgtgatggcccctttatcatttctgattgtagttggaatcttttctcattttttgttgattaacctgcctagtggtctgtcaattttgcttaccctttcaaaaaccaactttttgtttcattgcttcattgcataatagttattttttcatcttaatctcatttagttctgcttgatctctttgctttcttttcttttgctagatttgagtttgaattgttcttgtttttctagtttcttaaaaattttgaaactttgatcaaagaaactgaagagttcacaaacacatacaaaaaatagaaaaaatatcccatgttcatggattgtaagaatgctgttaaaataactacactaccccaaaagatacaaagattcaatgtaattccaattgaaataccaacaacattcttcacagaaatagaaaaagcaatcctaacatccacatagggttgcaaaagatcccaaacaactaaagcaatcttaatcaaacaaaaacaaaaacaaacaaaaaacaaagttggaggcatcatactactggactacaaaatgtactacaaaatgttagtacatactgtactaaccaaaacagcatagtacttgcataaaaacagacacatacacaaacggaacagaatagagaacccagaaataaatccatttatttacagctatctgattttcaacaaaggcaccaagaacatttagtggggaaggaacagtatcttcaataaatggcactgggattatccatacccagaaaaatgaaactagactactatctctcaccatatacaaaattaactcaaaatgaattaatgacctaaatgtaagaactgaaactaaaaaactactacaagaaaacataagagaaatacttcaggctaatatctgtagaaataaaacctcaaaagcagaggcaacaaaagcaaagataaatgggattacataaaagtaaaaagctctgcacggcaaaggaaacaatcaacggagtgaagaaacaacctatagtataatagaaaatgtttgcaaactatttatccaacaagggattaatatgtagaatatacacaaggaactcaaactactcaacagcaaaaaaaaaaataataaaaataatcaaagtagcaatacaaatggacaactatatgaaaaaatgtacaacatcataataagagaaatgcaaatcaaaaccacaatgagatatcatctcactccagttagaatagtgattatcagaaagacaaaaaaaaaagcagttgctggtgaggatgtggagaaaagaacttttacacacttttggtgggaatgtgaattagccatcataaaaacagtatggaagttgctcaaagaactaaaaatagaactaccatatgatccagcaatcccactactggtctcagtcatatgtagaagctaaacaaattgatctcccagaagtagagaatagaatagtggcaactagcagctaggaagggaggagagatagagagaaggtagttaaaggacacaaaaattatagcttgataggagtaagttctagggttctacagcattgtaggctgaccataattaacaataatttactctatattttccaatagctagaagggaggactctgaatgtccccataatgaaattataatggtttgatgtgacagatatgctaattaccctgatttgatcattataacttacatacaggtattaaaatatcacaatataagccataaatatatacagatattatgtgtcaattttaaaagaatacctgtaaacatcaagatatatgaatgttatgaagatcaaactgagaactgcaaaatcagcatattctccactcagtctcttcttctcccaaataataacatacatacctgacagacatacaagaccttgtgcaacatgtgagcaggaacgggcaggtagcaggctgaggtgtctgcccagctcagtatttggatattaacctccactgtatttcactttttccttcctctagactggatcattccaggctagagaacattgttaatttatcttctatttgcttttgaactgagtacatttcagggtttagttttgtttttgttttatctatatctagctacatatttcatctctttaaaaaataaaaagaaaattgagctgagacaattgggttgttaactctatcaaaaaactttgcagccttaaaaaaaaaataaattggatcagtccattcactgtcctagtatctgtagccccaatttaaagccttcctttttaattacaaaaatctaaattgagaaaatgcttctccccaggaagattttaatatacgggaacagggcacagtcaccctaatacaaagccctaagcagcataggtgggccccaggacccctatgaaatatttcttgcactgtttctcgtgcgcaaaaagtccccagagatggccagcaagactctgcaactttcaattcattattccatacctgtccttctaaacctctatgctgggaccaaagtcctactctaccttaccttaccagggattgtagggttttcttatggtcaaaacaaaacaacaacaacaacaacaaaaaccacacacacacacacacaaagaaaaacccttagaagcttaggtccatatcctataaaaagaatgtcacagttgcactttcaatccctatgtcttgaccatctgagctttcacccatagcagaaactcagacttctgcccacatgtgacctccctgaggataagctggacttgtaacagatagaggtatggtaaagaggcagtcgcaattagcccttccattttgtccccataaggaggtagggacacagtgctttagttccttcccagactccaagatgccctcctacagccagatctcactcaagtgcaaggcagtaaaaatgttaggagttcaggctgtagagtcagcctgctctgggtttgacttccagttgcatgatccaaagaaggtggcctaacatctctgagactcattggcccagtttaacagatgaagaagctaatagtcgtctcacaagccatagtttggagagagagagagagagagaacataaatgaagctctcagcttctggaacataattaatgccagccaacattaagaacttatcatgataattagtaactaattaatggggaacgaatgctcacaaaaaggagggaaataaaaagcacagaatcaatcaacagggaaatagttaaatgaactttgttgctttcgggtttaggaagcactggcacacacattgcctcattttattatggtgaacatgtaaaagaggcaggtaccattattcccactccacatgttggaagtaaagctcagagttgcaaagaaaacgagtacttaaacaaaggatttctcagcaaggcaaaatttacttctgcagaagggtgctgcttgcatgtctggtcaccacaagagcacaccgaacaaagtggggaaggggcttttatccctaatgcagtttgtccctgctactgtgtcctgtatccattagctggagttggactgcacaatttaagctgaaccccactggctaacttgagaggtgcaggaacgtggttataccaatgggaagggcagttttggcaggaagagctgttgcgacaggaggggtaattcgcagaatgggttagcatatgtggtctttgcagataaggactggcgggaaagttgtttactgaaactaagacagggaggcataagggataaggaagttggtttgggcttgaagtagggaacaaagaacaagggcactgaacaagctaaacctttgaagaggaacttcttttgtatctgacacacagactagaaaaagtgtcctagactgggcatggtggctcatgcctgtaatcctagcactttgggaggctgaggcaggtggatcacctgaggtcaggagatcgagaccagcctggccaacatggtgaaaccccatctctactaaaaatacaaaaaattatctgggcgtggtggtgggcacctgcaatcccagctacttgggaggctgaggcaggagaatcacttgaacccaggaggcagaggttgcagtgagccgagatcacaccattgtactccagcctgggtaataagagtgaaactctgcctcaaaaaaaaaaaaaagttctaaaaatgtgggtgggtttgccagaggccatatgaccaggaggtagagaatccaggacttgaatccagatattctgtccctaaatccactaagctaagttgtttcccacggaaaactgaactccttttttataaccttctaagagggctagctttttaagcaaccagttctgaaagcatgttcgctaatgaagagccctcgggaaatgccaaggaaacctttgcatgggtgacccttatcttgcctccgtgtcctggccaccagaactctgctgttcttcattattttacgttgaaacaagatatgcccccaaatttcctgacaccttttccatccaccctactatatttaaaaccaccagctctgtgcaggggatgggaactctggaacaagttcatgggactacttcttaagaaattaaatggtaatttttaaaaagccacacccgaagaaaaaaacacacacacacaaaaacaaaaacaccagtgtagtaacatagatatgacaaggcctgagtgacttttgagattaaaagtgaaacatttcttagaaaatgatgattgacttgatgccttagactctccagcacaattgctggcctgtggcctcactgcggctgtgttctcgagcttgggtcctttctgactcacccgtagaccacagtgacgcctcctaattaagactttacctcttcttctcgccctgccaagtcactgtgcacccaataaagtctctttagaatactttcaacgtcattgccttgtgttcaatgtattttgcatcgtattcaacactctctgtagcccaatctcaaactaactctccgctctctctcttactgcttcactacacataccatactgtggccagacaactctccaagggaagacctctgcttaaatggcagagtgaagtgtttcctaaagtcctctaaaattctctctgtcctcccaatccccttcctaaaaatctgtggtcaagttaagaaatgttgcttggtaatccttgatctagtttcctcacagttgttacattattgcctggtggccatatttgcagaaagcccagaactctgaatatttagagttgggtgaatttttttttcctgacctctcccacctactagtcatatgatcttgaacatgtgaaaactcatctgtgaatattttctcatgtaaaaaatgggagtaatacagctttgcctatatgcttagagtctacttcagaagcgttccttaatgtctaagtctcttaaaattcttatgagaatgtctgagcattccccagtggcatatctggacagtgctctgtagaaggcattctactgggtgtgtgggagagtgaaagatacgtaagatctagctcctgttccaatgaacctttgtaggtgaggagactcctaccaaaaaagtctgtactactgcacattaatagtcaaatgataaactatgatgtacagagaaaagagaaggcactgtagactgggtggtagggggatcagctcatcctggtctgtctgggacttcccttgtgttagcactgaaagttccatgtcctaggaaacccttcagttgtgggcaaaccaggagggccgatcaccctacaatggttaaggaaggcttggcagtgattggagtgtgtctcagaggggcattttaggtggtaggaaacacacaaattgcctctctactaaacaaacatacacccaccctatgactcagcaattctagcgatataactgtgagagataagttcatggcagcattatttataatagccccactgcaaccaagcagatgtccaccaataggagaagggatatataattgtgcatttatagactggactattaaatacaacacaggtgaatttctcaggtatagtgttgagtgaaagaagccagacttatgaaaatcagaatctgtatgacttcttccatatgacagaagagagaataattaggagctattgattacaaggggacacaagggagatttggtgtgctagagaggttctatgccatgatctgggtggtggttacatgggtgtgtgtatatatatataagttaatcaagctgtttacttaaaatttgtgcattttattgcatgtattattcctcaaaaaaaaattttaagctgccatttattaagcctatgtgctctgcacagtgttaaacatttttatcctcacaatcctgtgaggtgtagacattggccattttatagattaggcccagaaaaggaaaaagaaaatttctcatgaccaagtgtttctcaaaaagtgtttcaaggaatagcagttctgcaggtgttatctgaaaaaaaaaaaaaagaaaagaaaaaaaaaaaaggcttgtgttcaactatgtttggggaactctgggagtaaaagggttaaatgtacctttttactgcaggattaatatgccaatgtgcatacctgatctcttttgtaaagcctccaaggtgtagtaaatactacagagaaatacctgtagaccaacatttacattttgagaaaatgatttagccttatattgtcaatatttgctttaatattctgagatttttgccctatgacattatgcagttaattttatagtataagcgctgcactcatctaacattaccagctcatatcagcccctcctccagaaaagcttttaggtgatactgttcttccctcatcacagcataatgccatcagcaaattagttattacatttcacagagcctagtggaaacctctcctgccaattactgagtagtcaattacattctggacatatgcattttacactgattaaaaaaagaattacagccgttgattttgcttttcaaattaagagataacatctatgtaatatagaattacagtgacttgactcaataaaatagtgatttaaaagaaaaaaaatgggatttggagaaaaactgtaaccaacacattatccaaaaacaaggaataagaaatgttgttagcctttctaagccccaaagactgaaagacctcagggaactgtaagttctaacctaatactaatactaccttgaaaagccaaaatgttaatttcctccagcactggagaggatttgtctcactagaaaattttagatataaacaccaagtcaaaaataattcttcagtgactctgagcattctgccaatgacaacagatttaaaatgcattttagaagcaatgacagggaattaaatagatttctagtgctgtaaagctgtaaagcttaatattacttcacaaagtgttaaagtgtctgatcttccctcagctcatttggtaccttgtgagcactgaagaaaagctaagtgcaggggcactttattaatgtattggaagccacatcaatggtagtatgcctaacaccttccaaaaagttttgagaaatctaaagtaaaacggcatgtgagttcctaaaagccttaacggaaaatattgtcagctatcacctacaaagctgcctctagctaaaggccagctataaattagagatatttaattttgcagtaacactcacaaaaaactacaatgcattatgcttcccctgaaaataatgcaaagattctaattagtttttaattgcttgctaaattgttcagttttattcaaaatggcctttaaagagctatgcaccaaaaatacttccaatatttctgtgagaaagttgtcagccctcctagcctgaaggcagcagaaattgaactccacaagtgcacaggcatggggggctcacatgatttttagtaagggaggattttatttcaaccacctgtgacctcaccaaaacaaacaggtctgagtgcagaaaacaacttgatgtaaacaaatggaatctgggttgcctgagattctgggatgtgaatgcgttcacctggaaaagataatgtcctgggaggtcactctacccagactcccctttatctaaatattctcaaatgtttctatggtcaaacaccaaccattttagttaagatttatacagaaatgagccagagaaactcttataaatttgacctggttacccactggctactaacagagtcatccacttcctttggaaatggttccaatcctgaagattcaagacaacttcagctttcagtcaagattgagtaacagttatcagatttaccctcctgccttaaataactacaaaagtggacaaaatatatgaagcaatggttttctggacattaggtatcaggcaacacaggactgtgatacgtaagaagggaaatagaaaaggtgaactctacaattataccagcttcctacctgaaggcagtttccaggccttagtacagggaggggaaatgaagctcagctgattcaccaattcagggagacagagtcagagttcagaggacaaggcagccagaatttgtaaggcagagcacaggagatgagggaaatgcagagccagagagcaccagaaacctgcagacggtcccctcaaggattacttgagttccaatctgtatggtgtgagaagataatactcgaggctgggaaagagccaccagaaaggaataagcaggaaaaatctcactcctaccagccagagtgaaaagaccacataatacatgagggaccagacagatttctttaaaataaaggggaatcacatgaggtatctaaataagtcaaaatcatagaaacagaggttggaagatggttgccgggattgttgagaggagacagaattagtgtctaaggggcatagagtttcagttctgcaagctgaagctctggaaacctgttgcacaacaatgtaaatatactaacattactgaactgtacacataaaaatagttaaggtggcaaatttaactttatgagtttataaccacaattaaaaataaaatttaaacataaataacaataaaaatgaataaaaaggaaaggagggcctaaattagcccaagactgctctgcatgtgcccaaacgaagcttacaagcaagcactgaaaggatccaactaatcccaaataactactccacaaagaagccacattacttaaagaaataaaaccaatcacagcaataatatgaaattcttcgtattcatcatccagtcagaaaaaagacagcaaagaaatggaaaaatatgacccatatccaagagaaaaagtaatcaatagaaacagagccagaggcaagagaggtaataaaaagggcaaataaatatactaaaatggctattataaatatattcaatatggtcaggagagaaaaacatcatcatgatgaagagagagagtaaaaaccatttagaaatgaaaaatacaatgtctgaaataaaaaattcacggaatgggattaacagtggtgtaaacagtgcagaggaaaagatgagcaaacttgaaaacatggtactagacattatccagaaagaaaaaaacgacagaatgaataaagcaccagtgacatgtgggataaaatgaaagaagtaacatgcatgcaattacagtcaaggaagtagaaaaaagagaaggtggaatagaataaaaatatgaagaaataaactcatatgatgaagtacaataaactccttgcagaataaaaatgaagaaaaccacacaaagacacgataatgaaatgttaaccagtaataaaatgaaaatctgaaaaaacatccaagagaaaaagatacatgacagcagcattgtcagaaattatgcgagccaaatgacagtggaggaacatccttaaagtactgaaataaactgtcgattcaggattccctacccagcgaaagtcatctttcaaaattaaagacatttttcaaattaaagctgggagaattcagttgtcagcaaaacttaagcaaaagaaatgaataagatactaaacagaaatttgagcctttaccaaagagaaaagagcactggaagtggtcattatattaacactattaaaaaattttaaatctttttaaaggataatagtttcaaacaaaaataacaacaacatcttgagaagtttataaacatatgtaaagagtacaatgtatgacaacagcacaaacgataggtgggaaatggaccttacacagaaggggataaaatattatttgcaggtagtacgtgcatgttgtaaaccctgaagcggggtcagcaaactctggcacaggctaaatccagcctgttatttttgtatagttcagaagctaagaatggtttttgcattttggaagaggtgagagggaaaggaaacgtgaaagcatctacgtcacacaaaatctaaaatatttgctacctggttctttacaaaaaagttgctaagccctgtcctagaataaaatttctctaccttggtgctactgacattttgagccagataatcccttgttgtgggggttgtcctgtgcactgtaaggtgtttagtgggactcctggcctctacccaatagatgccatgaacacccacccccagtagtgacaaattcaaatatgtatccagacactgacaaacgtcctgggggtgagagagaaatctgactgcagttgagaactactgcactagagtacatctatttttttttttttttaaataaaaaagaggtagagctgggccagccatggtggctcacgcctgtaatcctagcacttctggaggccaagcagggtggatcacctgaggtcaggagttcaagacaagcctggtcaacatggtaaaactccgtctctactaaaaatacaaaaattagctgggcatggtggcacttgcctgtagttccagctacttgggatgatgaggcaggagaatcacttgaaaccaggaggtagaggttgcggtgagcagagattgcgccactgtacttcagcctgggtgacacagtgacactccatctcaaaaaaataaacaaataaataaataaaggtagagctgataagccaatagtagaaataaaatgaattcttcaaaaaaaatttttaaactctcattccaaaagaagtcagaaaaagaaaaaagatttttcagataaggcataagtataaaccacagaaaaaatattgataaattagacttgatcaaaatttaaacttctgctcctcaaaagacactgctaaaaaaattaaaaaccaagccacggacagaaggaaaatatctgcaaaacacacatttgataaagtactagctttctcccaccgcccaaaaaaaaaaaaaaaaatatatatatatatatatgtatgtatgtatgtatgtatgtatatgactcaagacaacctgatttggagacaatataaaaagaaggcaaatatgcacatgaaaatatattaaacatcattaataagagaaatccaaattaaaaccaaaatgaactaccacgacacatccacagaacactgaagatttaagagacggacaataacaagtgctgacaaagatgaggagcaactagaactctcaggcatggctggtaagactacaaaatgggacaatcactttggaaaacaatttgaaactttacaatgaaataaatgtgcactcactatatagcccagcaatctcataggtatttgccccaagagaaatgaaatatatgttaaggcaaaaattgttgcccaaatattcttagcaactttatccatgataatcaaagagcatgaacaacccaagtggtccatcaactggtaaatgaataaatagaaagaaacaaactactgatacaagaaacaacagatgaattcatcttaagggcattatgcaaagtgtaagagcaacagcaaagactatatactgactcatttcttttctatgtaattcaagaataggcaaaactatagtgacagaaagcacatcagtggttgccaggtcgaactatgggcagaggaacttgcctgcaaaagaaaatgaggggacttttggaggtgatacaaacattcaatattatgattgtcatagttacacaactgcatatatttgtcaagacccagagaatcatttaaaattggtgatatttttattgtatcaaaaaagatgatataagctgatttaaaacaaaaatagccaggaagcctttagaaataagaatggagtaagagtgagactacattttcccctagtcattagtaggaaaaacaacttgctacaattcaggatgtccgggaaatagtccttctggtcaaatttggtagggtgctagtgctttgggtccttgtacaagaatatacatttaactaaaatactggttgagagtatttaggccacagggttaacagtaggcacacatgggaatttagtattattcccagtaaacggggaaagaatcaactcttcaatagacagtatcaagagaactcctgaggcatttagagaaaaacagttccatatcatacagtacacaaaatcaaattacagatggaatacaaatgtaaatttaaacaagattataaagtcactagaagataatattaaatttttaaaatcttgtgatagataaggcctatgtaaacaagtcacaagacccagaagagtagatctgactacaattaaaacttaaataaaataccgtaaaccaagttcacaagctcagacagcccaaaagatacttcatacatgaaagtataaacatttctataaatatgagtataggttacttataaatatacttatatatatatgatgcatttgtttaaatactaaacgattaaaagccacactgtatacaatacctataaatcaggagaagaaatggataaattcctcgacacatacactctcccaagactaaaccaggaagaagttgaatctctgaatagaccaataacaggagctgaaattgtggcaataatcaatagcttaccaaccaaaaagagtccaggaccagatggattcacagccgaattctaccagaggtacaaggaggaactggtaccattccttctgaaactattccaatcaatagaataagagggaatcctgcctaactcattttatgaggccagcatcatcctgataccaaagccgggcacagacacaaccaaaaaagagaattttagaccaatatccttgatgaacattgatgcaaaaatcctcaataaaatactggcaaactgaatccagcagcacattgaaaagcttatccaccatgatcaagtgggcttcatccctgggatgcaaggctggttcaatatacccaaatcaataaatgcaacccagcatataaacagaaccaaagacaaaaaccacatgattatctcaatagatgcagaaaaggcctttgacaaaattcaacaacgcttcatgctaaaaactctcaataaattaggtattgaagggacgtatttcaaaataataagagctatctatgacaaacccacagccaatatcataatgaatgggcaaaaactggaagcattccttttgaaaactggcacaagacagggatgccctctctcaccactcctattcaacatagtgttggaagttctggccagggcaattaggcaggacaaggaaataaagggtattcaattaggaaaagaggaagtcaaattgtccctgtttgcagatgacatgattttatatctagaaaaccccattgtctcagcccaaaatctccttaagctgataagcaacttcagcaaagtctcaggatacaaaatcaacgtacaaaaatcacaagcattcttatacaccaacaacagacaaacagagagccaaataatgagtgagctcccattcacaattgcttcaaagataataaaatacctaggaatccaacttacaagggatgtgaaggacctcttcaaggagaactacaaaccaatgctcaaggaaacaaaagaggatacaaacaaatggaagaacattccatgctcatgggtaggaagaatcaatattgtgaaaatggccatactgcccaaggtaatttatagattcaatgccatccccatcaagctaccaatgactttcttcacagaattggaaaaaactactttaaagttcatatggaaccaaaaaagagcccacatcgccaagtcaatcctaagccaaaagaacaaagctggaggcatcacactacctgacttcaaactatactacaaggctacagtaaccaaaacagcatggtactggtaccaaaacagagatatagatcaatggaacagaacagagccctcagaaataatgacgcatatctacaactatctgatctttgacaaacctgagaaaaacaagcaatggggaaaggattccctatttaataaatggtgctgggaaaactggctagccatatgtagaaagctgaaactggatcccttccttacatcttatacaaaaatcaattcaagatggattaaagacttaaatgttagacctaaaaccataaaaacctcagaagaaaacctaggcattaccattcaggacataggcatgggcaaggacttcatgtctaaaacaccaaaagcaatgccaacaaaagccaaaattgacaaatgggatctaattaaactaaagagcttctgcacagcaaaagaatctaccatcagagcgaacaggcaacctacaaaatgggagaaaattttcgcaacctactcatctgacaaagggctaatatccagaatctacaatgaactccaacaaatttataagaaaaaaaacaaccccatcaaaaagtgggcgaaggacatgaacagacacttctcaaaagaagacatttatgcagccaaaaaacacatgaaaaaatactcaccatcactggccatcagagaaatgcaaatcaaaaccacaatgagataccatctcacaccagttagaatggcaatcattaaaaagtcaggaaacaacaggtgctggagaggatgtggagaaataggaacacttttacactgttggtgggactgtaaactagttcaacctttgtggaagtcagtgtggcgattcctcagggatctagaactagaaataccatttgacccagccatcccattactgggtatatacccaaaggattataaatcatgctgctataaagacacatgcacacgtatgtttattgtggcattattcacaatagcaaagacttgcaaccaacccaaatgtccaacaatgatagactggattaagaaaatgtggcacatatacaccatggaatactatgcagccataaaaaatgatgagttcatgtcctttgtaggcacatggatgaaattggaaatcatcattctcagtaaactatcgcaagaacaaaaaaccaaacaccacatattctcactcataggtgggaattgaacaatgagaacacatggacacaggaaggggaacatcacactctggggactgttgtggggtggggggaggggggagggatagcattgggagatatacttaatgctagatgatgagttagtgggtgcagcacaccagcatggcacatgtatacatatgtaactaacctgcacattgtgcacatgtaccctaaaacttaaagtataattaaaaaaaaaaaaaaacctcaaatccaatagaacaggcaaaagatgaactggcaattttcagaaaaataaacctgtgaaaatatagtaaatgatgagataatcaaatcaaataacagtaatcaaataaatacaaattacaatgtttttttcattcatcagagaagcattttttaaaattattaatattcagtgttatgaaagcatgtcaaactgtcactcccatatactgtgggtaggagtataaaccagtgctctgttgttcaagacactctggcaaaagctatcaaaattttaaatccacaaccctcaatccaaaagtcttcatccaataatctaaacatagactatcttagagaagacacaaagtgttgcattttgaatcctttttatgtatctatttgtaataatgaaaaactggaaatttgaatacccatcaatactggggaataggttaagtaatgactcatccatccacagcagacatagatgtttttgcctgcaaagcagttcttccatcttcttctagcaacagaaccgccccctttcccctagaaactgcccttccatcacctgggaggtatcattcatgaggctctacccactctctatcaggacagaaatgtgatttaatgggaacagatgacttcatttctctggttgtatagtgagtggtcaaaaaacaagcggaaaatatgacccaagcagatgctagaagaaaggagtctctctctccgagtccataaaaactggggccatctttggcaccacgtcgaacaaagccaacctgagagtgacagccacaccagaaaaggcagaactaaaaagatggatccaccaaccatgcctaaaatcagctcttgtcctcagacttcctagttccaggaccaaacctcataaggcctgcttgagctgagtttctgtaacttataactgaaagaattctggcaatggagtagaacacaaatacacagggatgaggtggatctgtatgtacagacataattttccacaaggtgttaagggaaaacagcaatagcaattttcagagcattattatattatgcctggtttgttgtttttaaaagatatacatttttctgttaatagtgagcgctggcaaaagaggagaatattcattttaacactaacacataaaagaccttgaaaaatattatttatacacattttttaaaatcacacaataaaataaaacatcatgcataaaatttgcatcaaagcccagtcatcaaatttaccttaatttccaaagaagcccatggaatatttttcctagaaaggagaagaaatagcagcagcaaactgaattataaagaaacaaaagtggtattgctcccatgaggtcatcagtgtttgatatataactttcttcatctccctctggaaagccaaatccagaaaataaatatttcaacatccttctacaactccaggaaagggagatatacttgaggtcaaatgatctctgggcagtttttaaaaatatattcatgtttacatctatgttgcaatgacagaccaagaaacctaggaaaggtgatacttgtgaagctcaaatgtagtcaattaacatacagaattttgctacctgccatattcaggttacactaagggaagaccagaaggacaggacacagggtaactcaatcaacacagaagactatcctttttccacatcagtgttttcatctaaaatgccaaatccataccactccagggtgctctcagtactccctacactgtgctgagatgtgtgactccccatgactgagaaaaaaatctactctctgtaacttaaacaagaacgcataaggcctattcactaataactaattatgtgaataaaaattaatattagcttagatttaaactaaaatcaaaataaactctgaaaaactatcatgctataaacaggaacaaggatggtattaacttcactgacctatctgtgtattgtcttgacattctagaaaggtacaaaagaatatataaaatctaaactccaagataaagtgaaaattcaattgaaaaaccaacatgattctttaagatgaataaatggctttatcttgaggcatcatatctagagggaaaaagaaaaaagaataaatggtttttaagtcaatatttgactgaagctgatgcagaattaatcagtattacattttaaaactctttgcaacaggatttttaaaaagaagtaaaaaagaaacctttcaatgatcaaacaataaatctaacatatatccttctacatttagtagcatcttaaaaataagagtttttttttttcaaatttaagaaacaaatataaccacacttagggaaaaaaaaataatactctttctgaaacaccaaaaagataaaatactgtgggttcttaagataattacatatgccacactggcactatggtccataatgggtttgaaaaaataacaagatttgattttattatttcatcactataatcttaatcattaggcatattaatgtcacgtatacttttttaatatttatttttaaaagctatgtctcaacaatatgacaccaaaaacacacagctgatacaggttgtataggtaatcattttgactgtgaaaaaatatgatcagaatactgttacaataaaggaaaaataccttctttttaatcattctcattcagcaacagtaaaaatgctctatgtacacggtggctctgaaggacacatttcatctctttttcagacctgctgtgctatctattgctgttttggtgattacacagttcaatatgaaaatgcgtcccattcagattctcaatagtaagtctgattaggcagataactttccaatcataaaagcttttattttaggacaaccattatgcaaatctagggtggaaatcggactcactgtaattgggataagaagacactctgagaagaaggctgtacatgtgacactgcatttggtgcactcgtcttgcattctcttcctttcttcctcctctttgaagccccagattaaagtataattacactagagagttacaaatgggcttattagaagagaactatatgtttaagacagcaaggctttcagataagaaatctccaaatattttctgttatatgtttttacagtctttcttataaagaaggagtgtttgatgcgcaacacctgctaacagaaataattctacactcaagcccagtagaataatcaaatataaaatacagacataaagcaaactacaacggcaacagtgattcttggggcagcatgtgcaaaatacagtattttgctatctaatatcattgtgatcagaaaagaaatgtgccaaaacactgtttctcattccacttgaactggatccccataattccaacaaacatcacttgtgacattaggttgtcatcagcttgcatgatccccagttcacttaaccttttcttcttcatctggcctttttgtgtaaaggcagaaaccagttcatttacaatttccctcaacttgctcagaaaggtcagatcttgcataaaactccattttagcaggtgcacattgcatcagctcctctggatctactctttcagctacatctgcctttctacttgtctgaattttaagtgctttattttctggataaacaaactatgacaaagttcagtatgcaagctagcccaactaaaacataacatttctacacagtctgttagagctttcaagtgttttctgccaagtattcctgctgtcatctaactggagtttacaaattccttgccataagaatctcaatgagtagttttttccaattctgtgaagaaagtcattggtagcttgatggggatggcactgaatctataaattaccttgggcagtatgaccattctcacgatattgattcttcctatccataagcatggaatgttcttccatttgtttgtgtcctcttttatttcattgagcagtggtttgtagttctccttgaagaggtccttcacatcccttgtaagttagattcctaggtattttattctctttgaagcaattgtgaatgggagttcactcatgatttggctctctgtttgtctgttattggagtataggaatgcttgtgatttttgcacattgattttgtatcctgagactttgctaaagttgcttatcagcttaaggagattttgggctgagacgatgaggttttctaaatatacaatcatgtcacatctgcaaacagggataatttgacttcctcttttcctaattgaataccccttatttctttctcctgcctgactgccctggccagagcttccaacactatgttgaacaggagtggtgaaagttcatatggaacccaaaaagagtctgcattgctaagacaatcctaagccaaaagaacaaagctggaggcatcacactacctgactatactaaaaggctacagtaaccaaaacagcatggtactggtaacaaaacagcatggtactggtaccaaaacagagatatagaccaatagaacagaatagagccctcagaaataatactacacatctacaaccatctgatctttgacaaacctgacaaaaataagaaatagggaaaggactccctatttaataaatggtgctgggaaaactggctagccatatgtagaaagctgaaactggatcccttccttacaccttatacaaaaattaatttgagatggattaaagacttaaatgttagacctaaaaccataaaaaacccagaagaaaacctaggcaataccattcaggaaataggcatgggcaaggacttcatgtctaaaacaccacaagcaatggcaacaaaagccaaaattgacaaatgggatctaattaaactaaagagcttctgcacagcaaaagaaactaccatcagagtgaacaggcaacctacagaatgggagaaaatttttgcaatctactcatctgacaaagggctaatatccagaatctacaaagaactcaaacaaatttacaagaaaaaaacaaccccatcaaaaagtgggtgaaggatatgaacagacacttctcaaaagaagacatttacgcagccaacagacacatgaaaaaatgctcatcatcactggacatcagagaaatgcaaatcaaaaccacaatgagataccatctcacaccagttagaatggtgatcattaaaaagtcaggaaacaacaggtgctggagaggttgtggagaaataggaacacttttacactgttggtgggactgtaaactagttcaaccattgtggaagtcagtgtggcgattcctcaaggatctagaactggaaataccatttgacccagccatcccattacagggtatatacccaaagtattataaatcatgctgctataaagacacatgcacacatatgtttactgtggcactattcacaatagcaaagacttggaaccaacccaaatgtccatcaatgatagactggattaagaaaatgtggcacatatacaccatggaatactacgcagccataaaaaaggatgagctcatgtcctttgtagggacgtggatgaagctagaaaccatcattctcagcaaactatcgcaaggacaaaaaaccagacaccccatgttctcactcataggtgggaaatgaaccatgagaacacttggacacaagaaggggaacgtcacacactggggcctgttgtggggtgggggagggggagggatagcattaggagatatacctaatgtaaacgtggagttaatgggtgcagcataccaacatggcacatgtatacatatgtaacaaacctgcacgttggcacatgtaccctagaacttaaagtataataataataataataaaaagaaaaaaaaaagaatctcgatgagtgactgtcttgctctttatgccaaggtttcctgatcttcatacaggatcacaaattttgaactatttgtctacccttttcatcctacaatcttccccactcaacagatatttattggatatttactatctgttaaacattgtgttaggaactaggatgcagattggtaagacagtgctactttcctttaactcccaatctagcagcaaactctagatgagccccatgatcccagcccccggtattattttcatgacgattaaatggcaaaaggagtttgcactgcaatttgcaatgtaattaaggttcctaatcagttttctccagctggttgcaaaagaggaaaagaggaagtcagagagattcaaagcatgaaaggtttgccttgagggaggctctcttctgctgagatagaggggaccatgaggcaagaatctgagagcagcctctagaagctaagtgcgagccccagcaaatagccaacaagaaaacagagacctcagtcctacaacctacagaaatgaattctgttgatgaataacatgaatgtatttggaagtaggttcttccaactgagcttttcttttttttttttttttttttttgagatggagtttcattcttgttgcccaggctggagtgcaatggcacgatctcggctcactgcaacctctgcctcccaggttcaagtgattctcttgcctcagcctcacgagtagctgggattacaggcatgcgccaccacacccggctaattttgtatttttagtagagatggggtttctccatgttggtcagtctggtctcaaactcctgacctcaggtgatctgcctgcctcggcctcccaaagtgctgggattacaggcgtgagccactgtgtccagccccaactgagctttcaaaccagagcactgtccagctgacaccatgacttcacccttcagacctgtgaagaaataaagaacttgctcttcaggagtggaccctgaaggatgacaaggagtactcttgaaactgctttaaactttccttaactcggtcaatgcttaattcttctctatgactgagatttagtagactgagatctatgtcatcgctttgaagttcacaaatatccagtgagttagctcacctttgctgccaagaaaggcagatgacagggaggcacttccttctaccaataaaaaatggaggcaaactccactattggctccagtaaacacagccctcaacctggcacatggattaccccacctccaacctcaacagatatcagccggagccaccactgctatcacacacccatcctcattctatacgtttatagaaagccaaccacagtaagaagggaactgaaggaccacagaaaccacaatgtcaaggttttgaatgaacagttgaactagctgactttgaaagttcctttctccctcagattctataatgttatagctttaccaaaacttctctttctccatgcccaaacatattctggcaatcttaaaaaaaaaaaaaaaaaaagcaggaagactcagatccttaatcggattttaatgctgaaaaaaaaagtaaattaggtctgatttttctatctaaaattcctaaatatcgcataccttcagtttcatcttgggcactttcttggaggttagagaaaactgtagctttcaccaagaaaacaccataaccttcattttatgatattactcaccaaggatattttgggaatgtcataatgttcatctaagaagacctgtgacactgaaaacaaatgtttcaaggaactgtcttttcaacactgcctgcttaaaaaatcttgccttttttcacactattctaaaaataaagcagaaaagctatgctgctatgctgattcacatgctgtagcacagtgtgatgcagcattcctctgtcatttctgcagatctagaggcaacaaagtattcttgcaaaagactttcaatcattagctactgatattattagaatttatatactatttaggcctttcaaagtcggaaaacaataggacccaacatgggaatgtaataaagcataatttcttaggtgaaatcattccaacctttagaaagcaagtgtctcggccaatgctcagcttaatgaggagcccttccttgcaacagcgggtccattctcacgcagggaacccaaacttactcccaggatatatttctatgccagcaccctgcaagttacaatttgagataataacaatcagtttcaaaaaggcaggaagaattttattacaatcactttttaggcttttacacagtgcaaatgtaaagcacaaagataaagcattttacagataagctttattaggtattttaaaccaacacttcatttgttccagattagcaagtcattagcatgtatcattttcaaaccacccccaccccaccccaacatacaggctgagtgtcaacattcaattcctgttccactgtctttcattctagataaatcggttttcagattctgccaaaagtagaaatcctttaacaattttgttgaaagatgcacttaatcaaaatgaccattctctcatctactcaattagtgaagaacagtatttgagtttagtaaaatattataatttgagactagaaataaggccctatatttaaaaaattccagttataagataccccaatccaacttaaaaatcacttctacgaattaagcaatggccttcactgctacacaggttaaaattaacaactagttcaagtgtaatttatatagagtaaccagaaagattcaaacctggtccaattctctcacactgtctcctcacaccacatggcaccaacaaaaaagaaacagtaataggaataatttatttcctaatgttatgcaaggcactttaaaaagcaaaatgagtcactcaaacctctatagttatttaggaaaccacttaggaataatttaatacacaaaatcataggtgaagaagagctggtataactactcatgacacatctactgcatgtatgatacttttctaagagcagtcatataccatgagaaaacatttattattatttttccctttgcatatgcctgaaccatatatgtacacactaacttatctcttctgtagagatgtttttaaaaatctgctaactgggacttcagaaaaaaaattttcagctcggggttatgtgcaaaaaagacacaggagtgattatattaaaaatacatatacaaatagttaaatatcgaacttcaggaatcacataaaatttaaaaagaatgggaacagcagctatctggcaaatgatatgatcatattcaaacttagttataaagatgaacaaataatttggcaattaaaaagtaactgccacttgtgaaacaatagagatgtctctattttttctgctaggtataaccaaaaaccatgggcattgtatataaaataaacataagataactgaaaaatggaaagaaggtggcagaccagcagcagacctcaagacccaagaaagaacaccaacacagtgggaagttcccagggttttcttttcacttcataatccccagacttggagcttatgtagctggcaatccagtatacaaacagacaaagaccaaaaatgcccccaaaatactgctttgtctagtcaaaggactaggcaacctagaaagatgaaggggtgggttgcccctccacacctgtgggtgtttctcgttaggtggaacgagagacttggaaaagaaaaagacacagagacaaagtatagagaaagaaataaggggagccagggaaccagcgttcagcatatggaggatctcgccagcctctgagttcccttagtatttattgatcatttgtgggtgtttctctgagagggggatgtgtcagggtcacaagacaatagtggggagagggtcagcagacaaacacgtgaacaaaggtctctgcatcatagacaagataaagaatcaagtgctgtgcttttagatatgcatacacataaacatctcaatgctttacaaagcagtattgctgcccgcatgtctcacctccaggcctaaggcggttttcccctatctcagtagatggaacgtacaatcgggttttatacggagacattccattgcccagggatgggcaggagacagatgccttcctcttgtctcaactgcaagaggcatgccttcctcttatactaatcctcctcagcacagaccctttacgggtgtcgggctgggggacggtcaggtctttcccttcccaagaggccatatttcagactatcacatggggagaaaccttggacaatacctggctttcctaggcagaggtccctgcggccttccgcagtgtttgtgtccctgggtacttgagattagggagtggtgatgactcttaaggagcatgctgccttcaagcatctgtttaacaaagcacatcttgcacaacccttaatccatttaaccctgagtttgacacagcacatgtttcagagagcacggggttgggggtaaggtcataggttaatagaatctcaaggcagaagaatttttcttagtacagaacaaaatggagtctcctatgtctacttctttctacacagacacagtaacaatctgatctctcttgcttttccccacaaaagacagaaaacagacaataatacctccattccagccaaacagcacaaaataaaagagcgaccccattcccatcatgccagccaaggttgagaggaacctggacttttgccctctgaaggctgtaaccaggtatcccaacactcccactggggtggaatcagtaaaagcaaaacagggagccaggactttcatccccactaactggtgacaaggccctctctgcagcagtattagtgaagactgaggagcctgggcttgtacccccacctagcagcaacaagatgcctgccccctccccattggggtggtgtcagagcaagcctagtggagattacaactttcacaattggccagtggtaagaagaccagccccatataccacagtgtcagtggagaccaaatgggaagctagaattcccactcttacccagcagcaacaaggagctcctccacccagcttgagtatcaacagaggctaaggggaatccatgacttctacctcaacaaggtaatggccacctacccccatcttttatctttctgcagaaatgtcagagaagttagagaagatccagactttcataatgtaatacaaaaaatgtccaggattcaaatgaaaattacttgtcataccaagaaccaagaaggtgtcaaattgaataagacaatcaactgatgccaaaaccaagatgtcagagatgacagaattagctgacaataatttgaaagcagccaggataaaaatgcttcaatgaggaattataaacatacttcaaacaaatgaaaaatgagtctcagcaaagaaatagaacacagaaataacccaattaaaattttatttttattttttatttcaatagctttaggagtgtaatatagtttggatatttgtccccacccaaatctcatattgaattgtaatcgccaatgctgagggtagggtttggtgggtggtgtttgagtcacggaggcaaatctctcttggcttggttctgtcttttcaataataagtgagttcttgtgagatgtggtcatttagtgtgtgccccctcctaccccctttcacttgctcctgcttttgccatgtgaggtacctgctccctttttgccttccaccatgatagtaagctccctgagcctccctagaagctaagcaaatgccagcatcatgcttcctctaaagtctgcagaaccatgagccaattaaacctcttttctttttaaattacccagtatcaggcatttcattacagcaatgcaagaacagcctaatacagaaaactggtaccaaggagtggggcattgctttaaaaacacctgaaaatgtggaggcagctttggaactgggtaatagcagaggttagaaaaagtgtggagggctccaaaaaagacaagaagatgagaaaaagtttggaatgtcttaaagactggttaaatgattgtgaccaaaacgctgatagtgatagggacaatgaagcccagcctcagatggacatgagaaacttactcaaaactggagaaaaggtcatgtgtgttatgccttggcaaagagcttggctgcattctattcatgccctagggatctgtggaagtttgcactacagagtgatgacttagggtatctggcagaagaaatttctaagccacaaagcactcaaaaagtggcctggctgctgcttccaacaatctacacccagatgcaagagcaaaggaatgactttaagttggagctttaaagggggggcagagcataaaagtttagaaaatttgcagcctggccatgtggcagagaaagaaaaagctttctgggggagaattcaagcaggctgcggaacaactacttgttagatacttgcgtgactaaaagggatccaagtgctaatatccaagacactgggaaaaaggtcttgaagccatttcagagctcttctcagcagcccctcctatcacaagcccaaaggcctaggagggaagaattgtttgggtggccaggacaaggttcccaaagcctgcacaacctcaggacagtgctccccacattctggctgctctggctccagctgtggctcaaagagttgcagatactgcttgtgcctccaatccagagtgggtaagccaccataggctttggcagcttccacatggtgttaagcctgtgagtgcacagagcgtaagagtgaatgaggcttgctactctctacatagatttcagaggacatacagaaaagcctggatgtccagacagaagcctgctgtaggggaagagccctcatggagaacctctactaaggcagtgcctacaggaaatgtggggatggaactcctagagtccccactggagcattgcctagtggagctgtgagaagcaggtgaccaaactccagatctgagaatggtagatccaccatcagcttgcaccctgagcctggaaaagccacaggcactcaacagccagtgagagcagctgcaggagctgaactctggaaaggcacaggggaagagctgcccaagaccttaggagctcaccccttccatcagtgtaacctgggtgtgggacacagagtcaacggagattattttggagatttaagatttcatgacttccctgctgggttttaaacctgtatgaggcctgtaacccctttcttctgcctggtttctcccttgtggaatgggaatgtttacccaatgcctatagctccattctatcttggaagtacataacttccttttgacttgccttgttcagatgagactcagatgagattttgaaccttaaacttttgaactaatgctggaataagttaagactttaggggactatcaggaaggcatgattgttttttgcaatgtgagagagacgcgagatttgggagggtccggggcagaatgatatagtttggatatacatttttccctgcccaaatctcatgttgaattgtaatccccaatgctgaaggtggggcctggtgggaagctcttggaccatgggggcagttccctcatggcctgatgctgtcttcatgatagtgagtgagatcttgtgagatctggtcatttaaaagtatatgacacctgcagtccctctatctctcttgctcctggtccagctaggagctgcaatgtgccagctccccctctgccttctgtcataatagtaagcttcctgagacctccctagatagaagcagatgccactagaagcagaagccactatgcttcctatatagcctgcagaaccattagccaattaaacccctattcctatgaactacccagcctcacatatttctttatagcagtgtaagaacatcctaatacagagtacacatgctttttggttacaggatgaattatagagtggtggagagtctgggattttagaatatccatcaccaaaatagtacacattgtacccaacaggtactttttcatccttcaccctccttccaacctcgcctattctgagcctccaatgttggtgataccagtctgcaagcctctgtatacctaaagcttagctcccacttgtaagtgacaacatgtagtatttgattttccactcctgagttacttcctgtagaataatggcctccagtttgatctaagttgctgcaaaagacattatttatttttcatagttcattattttctgagtagtatttcatgatgtgtgtatatgtgtgtgtatatatatatatataaaacacaaaaataaaaattttagaactgaagaataattaaatacctcaatgataagttcaacagcagaatgaaaagaacagaggaaagaaacagtgcatggaaagacagaacaataaaaatttaaaaattaccctatctgaacaatagagagaaattaaactgaaaaataaacgtaaactgagcttcagggacctattggactataagaaaagatccaatatttgtgtcattacagacctggaaggagaggagaaaaaaggtgaggctaaaaaggaaataatgactaaaagctcccacatttggtaagacacaataagcccacagagtcaagaagctgagcaaactccacacaggataaactcaaatgaatccatgaaatgatatatcataattaaattactgaaagctaatggcaaaaacaaaaaaaaatattgaaagcatcagtgaaaattttacaccttagccattggagagaaattgtgattgacagcatcagaaaccatggatgccagacaaaagaggcccagtattatttaagggtggaaagaaaagaactgtcaatccagaatcctatacctgataaagatattcttcaggaatgaagaaatcaaaacattctaagaagaagagaaactaagataattagcaaccagcagatctactctaatggaatgggtaaagaaagttctctgaacaaaagagaaataataaaagagggaatcttggaacatcagaaaggaaaaaggggcaaaagcaagcaaaaataccagtaaataggctttccttctcctcttgagtttaaattatgtttgaaatttgaaatgaaaatattagtatcgtctaatgtggttctagatgtacataaaggagatatttaagacgattataaaaagaagaaaaagaaattgcagggagccaaaggcttgtgggacgtgaccaactcagcattccactggaggctatatgatcaaacaacaaactgtttttcatgaatgcaggatgtgggcaaactcatgactgctcctgctggcagaaggtttgctggaggcaatcactccctggtgctgaggttatctgccgtgacatctacagcctgttgttcgaggactgcattcttgcaagcctactctggaccaggcagctgaccccttctttcatcccccttctcactatctcttttgcctaataaatatggaagactgtgtaaagctcagggcccttgtccactagaggcaaggtgccccctgaccccttcttccaaatatactcttttgtctcttgtcttttattcccacattcacccggctttgtttggtccccctaggtctgtgcgggttacatagtggtgccccagtcagcgacagaatcgggtgctccacaagagatgtaaaaaaagcagagtttctctacttcacttgaactggtgaatgaagacaccagtaaactgtgaggctatgtacatatattacctgaagcgatcactaaaaaaatagctacacaaaaagatatattcaaaaacaaatgaaactatgaaaactgctcaggtaatccacaggatggcagaaaaatgcaaatcaagaaataaaaagcagaacaaacagaaaacaacaaataaaatagactaacgactaaacatcaataattaaatgtaaatggtctaaagacattaaaagacacagattgggagagtggattaacaacatgactcaactatatgctatctacaaccaaatttaaacagaataatataggcaagttgaaagtaaaatagtggaaaaagatatatcatgcaaacattaatcaagggaaggcaagtgtggttatattaatgtcagataaggtagactttggagcaaacaaaattaccagagacagataatgacattacataatgagaaatatgtttcaccaaaatgacaacatagcaatcctaaatgggcatacaacaaataacagaactgcaagatacgtgaagcaaaaactaacagaactgaaaagacaaacatatccatacttgtgcttagagattttagcaaccctatctcaaaaattgacacaattactaaacagaaaatcagaaagaatacagaaaaactcaataataccacctaccaatttgatctagttgacatttatagaatgaaatacccaaaaacagcagaatacatattcttttcatagggccactttacacataacaagacagaccacatcttgggccatgaaacaaacctcaacaaatttcaaagagttgaaatcatacacagtgttttcttacaaccatggaatcaaactaggaatcaacaaaaagataacagtaaaactcccaatacttagaaactaacacttctaaaatctgcatgggtcaaagaatgaaaatacaaaatataaaaatatgtggaacacagctaaagtaatgccaagagggaagtttgttaacattaagtgtgcacactagaaaagaggaaaagtctcagatcaataacctatgctttcatgtggaaaacatagaaaaagcaaaacaaacccaaaacaagcagaaggaatgaaatcataaaaacaacaaaaaccaaggaaattgaaaacagaacaatttttaaacatcaatgaaacagggttggttcttaaaagagagagaacaaacgaactaccagtatagattaccaaacagagattatcactacagaccctgccgacatcaaaagaataaggaaatactacaaaaaattcgatatatgtaaatttgacaacttagaagaaatggtccaatactgctaaaagcaaaaactaccaaaatttactctatataaaataggtcatttgaatagctctttacctattaagaaaattgaattcataattttaaaaattccaaaagataaatctcctggcccagacggtttcattggagaaatctattaaacatttaaagaattaacagtaattctacaaaatctcttttagaaaataaaagagaaaaaatacttcagagttcattttatgaagctaatattagtgatacccaaaccagacaaagacgggagtacaaaaaaaacaaaactgcagacaaatattctttatgaatatagatgcaaaatttcctcacaaaacattagcaagtataattcagcaaaatataaaaagattatacactatggcaaagtggtatttatgccattgaggcaaggctggttcaaaatttgaaagtcaaccagtataacctatcattatttttttttctaataataaaaatcaggtgatcatctcaagaaatgcagaaaaatacttgataaagaatttgataaagaatatccataaaaaaacttgataaagaatattcataaaaaacctagttaacctcattcttaatgatgaaatattgaatacactccccataacatgaaaaataaagttaagatatctactcttattcaaaatagtgctggaagttctagccagtgcaataaggcaagaaatttaaaaaaaaaaaaaaaaaaaaaaaaagcttactaatcagaaaaaaaaaaacaaaaaaaaaacgcaacttttgatacttatagataacatgattgtctacatagaaaatcccaaggaatctacaaaaacacttttataactaataggtaacattcagcaaggtcaaaaaatacaaaatgaacatacagaaatcaattatatttctatatactagcaataaacatatgaacattgaacttaaaaatatagtatgacaatctaataataacaagcaatggagaaaaaactccctattcaataagtggtgctgggataactggctagccatatgcagaagattgaaactgaactccttcctttcaccatattaaaaaatcaactgaaaatggattaaggacttaaaagtaagatccaaaagtataaaaaccctagaagaaaaactaaagagctactgcagagtatcagcagtgtaaacaacctacagaatgagagtaaatatttgtaagctatgcatctgacaaaagtcttaatggctagaatctataagaaaaaaaaacaggcaaaaaacaaacccatttaaaaatgggcaacggatataaacagacacttctgaaaagaagatatatgcatggccaacaagcatatgaaaaaatgctcaatatcagtaatcattagagaaatgcaaataaaagccacaatgagataccatcttacaccagtcagaatggccataattaaagtcaaaaaatagcagatgttggtgaagttacagaaaaggtcatgcttaaacactcttggtggtactgtaaattaattcagtcattatggaaagcagtttcaagatttttcagtgaacttaaaacacaactaccatttgacctaacaatcttattactggatatatacccaaaggaatataaatcattctaccaaaaagacacacaaactcgtatgttcatcgcagcactagtcacaatagcaaagatatggaaacaacctagatgcccatcaagggtggactggataaagaaaatgtggtaaatatataccatggaatactgaggcagacataaaaaaatcatgtcccttgaagcaacatggatgcaaatggaggtcattatcctaagcaaattaacactggaacagaaaaccaaatactgcatgttctcacttatagatgggagctaagtactcagtacacatggacacaaagatgagaacaacagacaacagaagctactttagcgggcagagagggaggtggataaaggtcaaaaaactacctattgggtactatgctcactacttgagtggctaaatcatttgcacatcaaaccccagtgacatacaatttacccatgtaatgaacctgcgcatgtacctcatgaatctaaaataaaagttgaaaaaaaaagtacaaaacacaaacaacaattgtatgctgaagactacataatgttgatgaaagaaatcaaagatctaaataaacagagaaatatgttcacagattggaagactcaacataacaaagatgtcaattcttcccaagtttatatacgagtttattaaaattcctttcaaaatttcagcatcatttcttgtggatataaaattattctaaaatttatattgaaaggcaaagaacttgggtagctgaaacaattttcaaagagaccaagtgggagaaatcactctatttgatttcaagacgtaaatacagctacaggtattagtgaagaaacaggacactgatcagtgaaacagaatagagaacacagaaatagacctatacaaatattcccaaacaatatttgaaaaaaatgtaaaaccagtttattggaggaaggacagtcttttcaagaaatggtaaaggagcaactggacatccaaaggcaaaaaaacgaaccttgacctaaacctcacatcttacagcaaaattaactaagaactggattacaactttatataaaatgtaaaactataaaaattttagaaaaaaataggagaaaatatttggaaatctacagctaggcaaagagttcttaaacttaacactgaaatgctcagtccataaaaggaaaaattgatgaattggacttcatcaaaaataaaaactttgctctgtaaaagcccatataaagaagataaaaagactagctacagcgcagcagaaagtatccgcaaaccacatacctgacaaaagactagtacctagaatatatatagaactcccaaaactacagtaaaaaaggacaaacaatccaattagaaaataggcaaaagtcacaaatagacatctcactaaagaggatagaagaatggcaaataagcctatgaaaaaatgttcaacaccgttaaccactacagaaataattaaaaccacagttagtactacacacctatcagaatggctaaaacaaaaaatagtgaaaacaccaaatgctttcaggatacgaagaaactggatcacttaaacattgctagtgggaatcgaaaattgtataaccactctggagaacagtctggaagtttccttaaaaaactaaacatgcaactgccataggacctacaattgtattcctgggcatttacccctaagaaataaaaagtatcttctcagcaaaatctgtacacaaatgcttacagcagctttactgataataggcaaaaactgaaaataatctagatgtcctccaatgggtgaataaacaaactacagaaccaccacacgttggactactacccaacaataaaaaggaacaaattactggtacatacagctactgggatgaggctccagagaattgtgttaagtgaaaaatgtcagtcccacaaggtcatatcccaaaaggaatgtgatttcatttttaaaacttttttgaaatgatgaaataacagaaatggaaaacagattaaggtttgccaacagttaaggaagagactgatgggagaggaaagtaagtgagtgtggctataaaagggcaaccagaggaatcgctgtggtgatggacgtgctcctcagcctaactgaatgtcagcattctggctgtgctacgatactgtggtttcataagatgtcaccactgggccaaactggtaaagagtgtacatacaggatctctctgtgttatctcttacaacagtagtgaatctacaattacctcaaaataaaaagtaattaaataaaagcaactgagctttgactgttataaaattgtttataaagtcataattttaagagcctaaaattctctgaaagttacagtaaattgtgagatttattatttttcttactaatctatgttttgaaaatgctacgtaagaaccttgtacaattgagcttgcatgacttagtagatataaatgtctgaaattctttgaagaaagagaataggagtctgcacttacatcttggtctcatattttatatatttatttacaacttaaactcaaactatttcccaaaaagagctcatcatatcttgtcaccatgtaaatccaagttcttcattaaaaatgtgcgtgctgtgcctcatgctacttcacatggcagcacaattttctgatggagtctccttatggtgagtgcctgtgatgaaaacacacagctgactgctttaagaagtaatgtaccttttccagtatcagggacagcctggagctgacattagatatagtctaaatatttaataacttccatttaaacttgaattcgaaattcataaaatacaaaacaatgaccgttttgagctattttctcacatctaaaagtaacattcttaaaaaagaatgacttgacctcagaaatgcaaaagcacttttcattaccacaaaagaatatcagagatcaactttgctcagtatcttggggaaaaaagatcttattcaagaaagaagacacagatcttaggaaacaaatactactgcaatgtgaagatagctagtttcagtctagtgctaaattgaaaacaatgaatacagaccactacgttggaaagtattaaaagaaaaagatgactgcaccgagaagaaattaatattaaactaacacattttcaagaataggctgaactattttttacttcagggtaagattcctaagttgtcatgctgtgtacataaataatcagccttccaagtacaggcataccttggagatattgtagtgtagtttccagaccactgcaataaagcaaatattgcaatagaatgagtcacatcaattttttggtttcttaatgcatataaaagttatttttatgagagaacaaggcaggaggatcacttaagcccaggagtttgagagcagcctggctacatagtgagactctatctctagaaagacataaaaatattagcctggtgtggtggtacgtgcctgtagtctcagctgctcaaaaggctgaggtggaagaatcacttgaccccaggagattgaggctgtagtgagctaggactgcaccactgctctccagcctggttgacagagcgagaccctgtctctccaaaaaaaaaaaataaaaaataaattaaaaaaaaaaaaggtatgtttatataatattgtagtctaagtgtacaaaagcactatgttttaaaaaaaagtataaaccttaatttaaaaatactttattttgctaaaacatacaaggatcatctgaccttcagaaaatcataatcttttttgctggtggagggtcttgcctcaatgttgacggctgctgactgatcaggatagtggttgctgaaggttgggctggctgtggcaatttcttaaaataagacgaacagtttgccgcattgacccctcctttcgaaaaagatttctcagtagcatgtaatgcgatgttatgatagcattttactcacagaagaatgtttttcaaaataggagttgatcatctcaaagccctcctctgctttatcaactacactgacgtactatgctaaatcctttgttgtcatttcaacaatattcattctctttaccaggagtagattccatctcaagaaatcatcttctttgctcatccgtaagaagcaactcctcacctgttcaagttttgtcataagattgtagcaactcagtcccatcaccaggctccacttctaattctggttctcttagtatttccactcatctgcagttacttcctccactgacttcttgaccctcaaagagtttgggagtgttggaatcaatttctcccaaacccaatgttaatgttgacattctgacctcctctcatgagtcttgaatgttcttaatgacatctaagtggtgaatccttcccagaaggttttcaattgactttgcccagatccatcagagaaatcactatcaattgaagctatactttatgaagtctatttcttaaatattaagacttgaaagttgaaattactccttgatccatgggctgcagaatggatgttgtgttagcatgaaaagaatattaatctcctcgcacatttccgtcagagctctcaggtgaccaggtgcattgttcggtaagcaatattttggaaggatttttttttttttttctgagcagtgcgtctcaacagtgggcttgaaatattcagcaaacaatgcaataaacggatttgctaccactcaggctttgttgttccatttctagagcacaggcagaatagacatagcataattcttaagggccctaagattttcagaattgtaattgaccactgattcaagttaaagtcaccagtaagagaattggcctgtcttttgaagctttgaagccaactaatgacttttctctagttatgaaaagtcctagatgcatcttcttccaatagaaggccatttcatctacactgaaaatctgctgtttagtgtagccaccttcatcagtgacttcagctagctcttctggatagctttccgcagcttctacaatagaaactactgcttcaccttgcacttttatgttacagagatgacttctttccttaaacctcatgaaccaacctctgctagccaactttttcttctgtagctcccttgactctctcagccttcacagaattaaaaagagttaggaccttgctgtgtaggcttatgcttaagggaatgttgtagttgatttaatcttctatgctgacaactaaaactttctccatattagtaataaggctgttttgctctcttattcatgtgtttggcttttgatgtgcctttctcactaggcttaatcatttctagactttgtttaatgtgagggacatgcaactcttcctttcacttgaacacatagatgtcattgtagggttattaattggtctcctttctatattgctttgtctcagaatagagaagcccaagaagagggagagagaagggggcatggctgattgttggaatagtcagaacacacacaacacttactaagttcaccatttttctatggtgatgcagttcacatcaccccaaaacaattacagtggtaatatcaaagaccactggtcacagatcagcataacaaatataataataataaaaacatttgaaatattgtgagaattaccaaaatgtcacacaaaggcataaagtgagcaccagttattggaaaaatgaggccaagtagacttactcgaagcagggttaccacaaaccttcaatgtataaaacattcaatatctgcaaagcacaatacaactaggtattcctgtactcaacagtggcatttcattaaattctatcttccatagaaagtaaagttttccttcaaagcctagaatgagtaaatacaccaaacagtcagacatttaagatttcttttataacaccatgctgaacaaatcttatgcctgagatgttaatatcctcattcatgcagtccacagaagtgtcacctttttccctcttttctatcacaatattaattggtagaccatatcctaaggaagagaacagaaacatttaaggtgggtgaggggaaatgtccaaacacaaaaatgtagaacacatttctctagtgcaaggggcttgaaatgataatgagaccagtcaacccagatgcatttaaataaagtcgatctccccacatatcttatttaaaccagggcatcaaatttttaacaataacaacttcccaatgtgtccccatactagcaagactactctatcagccatctcagaacagcccagcacaaaatgcacatacaaagctgccatgaaagttaaaaaataatcctaaggatctacaactgggtcaaagggctttaaagcattcagctctcttaagcttttgtctaactgcatgggtgctgtggaaggaaccttaagtatctgagattctatgattctaatacaaattacatttgaataaacctaagcagttctcaagattacctaattttaatattctcgtagaaagaatgacttaaaatctgacaaactgacttatgacagtttagctacaggaaaaaacagtctatttcattaatcaacaaaaagcattagctctccataaatcttaatcaaatcagtaatacaggccaagcctctgagtgggcttacaaaaacctggaatatcggaaaactaaagaactcgcttgactttcattataaaacagaagacaaacacatagacgaagctgtaagaaagaaagacctcattgtctaatgataagtccttgagtacatgaaagcagtaactgcagtaaacaggcaaagccactgaacttatccatacttgaagggtacagacaagcctctgggggcactagagaaggcaagatgactccatacactggaatgctaccagggtggactagaaatgactgaacagtgagtaattttgtttctgattctgtatgtgtctgcctgtactttgaatattttctacaataaccattgtttttttagcatcagaaaaattataaatagaaaaagaattgcatattgaagaaaaaacagatttttacacaaattacgtattcttatcaatttaaaacataaagccattacctaaagtgaacagattttctaaagaaagagaagcccaaccataagtactattaataccctgcacatagtaggtactcaatatatctcttaagtgttaggtatagattactatcagataagctttaatttactcataagctagtgctccatatattcacaccagagataccatttgattcctcaattctcagaaatgtcctctgttagtaaatttacagtcatttttacactcaactatcagaatttgataggttatttatgacactctggcaattacattgtaatttcctcaccaatctaagaactcttatctactatacaatttataatatgaatgttatttttactctgccaaaaaataaagtgtttttattgcagtgatttatcctgcacatgtgttacttatacatacacatctattataaatcaagtattggagaggagaaagaacaaaattaacaaacataaaacaaaaaagggagtgagatgatgtactagtgaacagcaggaaattaaactcccagccttgcttccattaagaagttttgacaagataaagatcaagaacacagcttaagcagttagtgaacagctgcacaagtcccaaaatgatatatgatttttttgcattacaagcttcattgctaacttgtagcagttttggtaaatagttgaataggtacaactaaatttgacacattacggaaatatacaagaccaagatgaacaattgtaaagtaatctgaacttaggaattactccaaatgaacaaaaagattataactggaaaagttatttttaatagatattgaagatatctattaaagcagataatagttatctattaactattatatatttaatattaatctttcaacattaacgttttcaaaagtatactgtgtcaagacacaaagtgtagcatttgtgacactcagcaaacttttagagaattaagataatttttgataccaatttcaagtaaaacgcccttcaccatatctctcacaaaaataagctaaatttaaaacaaaaaacaaacagccatgcactaagatatcacaatatctatgagataagagcaagtaacaaactaaaaaatactgaaattaaaaataatattgttgggaatcttttttttttaattctagaaatttgacatcctttccataaatcacctacgatctgtatagtttgcttcttcctcatggtcttttttctatacagccctgtaagtatcttcccaacatatacactgctacaaagaaccacaagtccacttactcaaaaactgggtcaactccttttaagcttccaatgcctttaatgtttcaaggcaattcaataattcatttgaagtgaaataggttgaaatcacattcttggagctttgacaagaacagtcatttattgtttacttaatcatgtcatgcatgagagtttggttgtgtcttccatacccaccttccaactcaatggagtcaacactgcactccattatgccacataccacaaaatggtcaggacaaacgataacagtgtcaccttcatagcaggcatttataacagataatggatcaccgaagaactagaaaacaacaacatatttgcaaatatacacccacatatggtgtggatctctgtccccaaccaagtctcatgtctcatgttcaattgtaatccccagtgttggatgtggagcctagtgggaggtgactgggtaatggggacagtttctaatggtttagtaccatccccctagtgctgtctcatgacagagttctcatgagatctggttgtttaaaagtatgtagcacctaccctcattctctttcttcctcctcctccagccatttaagccatgcctgcttccccttcaccttctgccatgattgtaagtttcctgaggcctcccctgccatgtgtccttataacctgcagaactgtgagccaattaaacctcttttctttatcaggtatttataggcagtgtgcaaagtgacaaatatacaaccccacaaagcaactcgagtattattccaagtgccttcatgtctcactctgaaaatggagccaacactgcacgctgaagcatctcctttggtagtggactgaacctaatgcatgcctggtaagtggctactgctgatgaaaggcagggttctcactacttcctatttaacagaaaaccacctctgggaagctctgtgtagaattcatgaaaacctatggtgaatcagaaggaaaaaagccacttgcagcaagacactcttcttttacctgaatttctatatcttcccccaaggcacctggcaaagcctgtccatgagtagggtccacagcagaccagtcatcatggtggaggagatctcatgggtggaacttctgacaactggatggacaccctttgcttagatgttagaattctgataaccaaacacataccatgaagaaaccaaacagacctaacagttctcagtaagatagcaaggaagaaaagatgctaactagctaagaattacaaaggcacacatacctcaacaaaggactctccatgagttttagcttttgcttcacctgttcaatctctgaatacaattttaacccttcaaccatggagatattttcctgctcagagctacaatttgccaaactgcttctcagattaaaaaatttgctgtaactctcctcacattgagacaacagattgtggtagtcacgtcctgaaggaactcagttttcaagaatgtcataatccctgagagtttaaaagcaaactgaaatccattgcctttcagacacattttttctcattaagaaagcccatggagtcctcaaagacccactaagaaaagtgctttataactcaggtacatgttaagtctctctgaatagtactctaagtggtaactgttgaaagtttcaaacaccacttcattgaagtcattaatttttcttcttttgaggaattgttttttcttagatccaaacatttgtgctttagaattacctaaagttcatattgtacaatttgtaatcattatttaataagaaattattttcttctcatatattagattcaaaatcttaataaggagtgggtggcaagggccaactggggagtaggggtatagagggaagtaaattgtttcacaatggttaagactgccatgtttttcagagatctgaatgtgattttaaaatgttttaaaagattaccatatttataggatcaaaaattagaaatgactcaaactgtctagtccttccttacatttaaagcactatataggcacaaaattatgttgaatattcccagagaaagaccaggggatttcaaaaaaataaacctttgagattttgaggggaaaaaaatgctgtcattattagagaatgattaacacaaaataaccttgtactggaccaccttactggcacttgaaatttattcatttacataaattctcaaatataatgacagaacaaaaagtatgtctcaatgtaataaaataatttataaatgtacagtcaatagatattaaattaatgggtttaacaataaaataaaatattgccattacctgtagttttaaaataattgctttatttttcagttaaatgtatatcaactagctgtgccttaggttagagcttctcaattctgatgaatattagaatcacctaggatctttcaaaaatacagatgctcaggccaacatccagagcaataaaaacgggcctctgaaagtggagaggtattttttaaagttccccaagcatgtaatgtgtagccaaggttgagaactattgtcttagattattatttttttaacttcgtcatgctcttaagaagatggggggaggggagaaagctgaacaaaatcctaattcatatcaaattatggtgaacactcaatatttaaaatgaacagaagattttattttcttgcttttccaagtaaatggattgggtaaagcttgaaaaagtaaggattttgtctactttggttatccacactcatttaaagatactctagaaatctactttgcaaataagaaattacgaaccaaaccactggtctattaagttgcgaagattaagactaaaattttaaaataagtttcttagcatttccaatatccatgcaagttagcttatttcttctcattagattgatactttacagtctagaaccagtgaaccaacatcatcttcagacccctaagttctgaagtagtgtgttttgaattagaaaggaaaaatatttgccacatggtgcaaaatcaagacagtgatttgatcttgcctgctgatagctctactcctatcttagcccaggaacctttttagagtctgcatacatgtgataacattccagtttctccatcaagtgccacagtttcttctccgtaactaaagacaattcctcccttatgctgtcccatctgccagtgatgtacaaggcatgtatggagatcattacttgtccacacatgcaaggctctcaaatcagaatacaattttttttgtccacatacagatcaaatttgccagatatgcattatatttacctaccattacattctacttcaatcaaaaccaatcactgctctttaagagcaagtgtatcaaacctagaaaatattcaagctttttgatgttctgggattgtactgaacacactatagaaaaataggaaatgcacaatagaaaaattagaaaggtagaaatcacagtcaacttatgaaagctgaaatcagacatacataattgtaaaccaggtagaaccattaaccagattttcattttttaaaaaattttgttattatttactatttaaaccaagagaaacttactaaatcaaatcaaactgcatgaaaatgtaaaggccttgtcttatataatgtcaaatcatctttcacataggaaaaacaaattaccttctacaattctttttagtgtgagttctaattttattgcagcattgcctgttaatttactgctcaggaatacaggagaaaattactggtcttacagcaccatctagtggaaagataagtgtcgcatgtaacaagatcagcatagaacaactacttaatttaggttgcatgattaattttggtatttttgaacggaaaagcttttccttgtcaaaatatgataaattagaagaatgcgtttaggtatttttgattcatctgttagtttaacctagtatgttttactataggaacttagagtaaagccatatactttaaaaaaaaagtattatttaagtttcaagcaaaaaagtctctataatgcaaataagttctttgtttttcaaacaattgtcattaaatagatgttcacaaacctcctgattttaggcttagtttataaacagttaaagcaggtttctctgcacttgttcgtttcatttaataacttgaaaaggggctgcactatttgtatattggtctatttctgtctataggcccttggagtaagagtatgtgcgtgtgtatgtgtgtgtgtatgtgtgtgtgtgcgtgcattgcgcatgtgtgtgtctcacaaaggtaaaattaagccatggtaactattttttcaatatgtacaaggtcagtaataaacacaatctcaattgaggtttaacacgtctgacaaaacaatcatatgcatcatccttttcttcatcccaactcttccaaatgttctggtagaaaaacctgaaaaataacttaatatcattcaaatttaatcactggctccaaatgttaggattctggagggatgagagctaaagaataaatcaaagcaattctcatatctcagagaatgctgcatatttgctatggttatcagttgagtcacacaagataaagaccttctttgaatcagctagaggggtttttctataacactcatttttttaaaactttctttttatcagaagtagtatttattgaccatctctaactgggcaggtagtagttccatttgttgagatagaaaacactgggagagaaacaggtttggggttcaaaatgaagagttgtgtctttgccatgttcaggctgagatgcctatctgacctcccagtaatgacgtcaaatgtacagagaaatatacaagcccagagatccagggaaaggtcagggctagagacataaatctgggaggtgtcagcatattaatagttttaaagcagtaaatgagatcatctagggacataatataaagcagcagttctcaaccctggttgcacattagggtcccccgggatactttaaaaaattgattccctatcccagaccaataaatcagatatctgcggagggaagggggttagcattcacatgttttttaaagctctctaagcactttaacaaatttttattacaaaaaattctaaacatacaacagataaaatagtatcatgaatatcatgtatccatcagccaacttcaagaattacccacttgggagaaatcttatttcatctctacctcaccaacctaccctctgctcctctcctctcatcatcctgaccctggcttattttgaagcaaatctcagatgtatcaaatcattcacaaatttttagtatgtagctctaaaataaatccttatgccaaaaaagttttaatttcttaatattaccaaatatccagtcagtactcaaattttcctaattttctcttttgctgttgttgttttacagttgacttgttcaaattaggatccaaacaaggccagctgtggcccttaatggatgcgtctcttaaatcacttttattctatacattaccccttgctctttttacccttgtaatttatttaatagtttcacacacactgaattttgttgattacttatccatggggtcatttaacatgtttttctgtttctttcctttctagtaaactgatagtaagatctagagcttgatgggcttcaggaaagactttttggcaggaatacttcaagtgaggtatgatgtacttgcatcgggaagcacatatagcaagtcctctaatatcagcctttcattgaatgcctttcactatataagggaataaacatcaattcctggccatagtcgcagtctgtgtggagttttcatgtttttcctatgtctgcatgggttttctacaggtactctggcttcccacatcataaagatgtgcatacgaaagatgagcatgctagctgaactggtgtgtcgacatcgtcccagtctgagtgtgggtgtgagtgcaccctgggatgaagtggcattgtgtctcatgctggttcctatcttgcaccctaagctgccatgataggttttggccacctgcatccctgaactggaataagcaggttggaaaatgaaagaatgaatatgaattattgtcaaataaaaaatcttaaattagacaataatcatacaaatgcacaacaataaacaatgcagtataaaatcactcagcgagtccatcaagttggtgacggtttgaaccacgtggtggtaaagggtactccttacaatttttactttgccgacatttattcctcaatttgaccaaccaccaccatgactgccgtgactcactgattcaccaaaaattgggtaaataattattttgtttttataatctttcttatatgtatacaggattcacatttatttcaatgttcaagattaaaattgtttttggtctttatttagaagtttggtgatgtttttgtgaccagaaataggccataggaactttaacttttgtttgtatctattagcctatggtaacattggttttgtaatttcgcttaaagttgaagtttccaagaacctgtcgacaacagtaagtgaagacttctataacgcctagccatctctttttgtgaggttaagactgatcaatggattcaggtgttgtcagcctgattcacccactatgaagttctctattagtttttcacctaaagattacagcagtcattgaggatcactgcctacaacctttatttcattagtggttacaaaatatggatattctatcattccttcttcatgtagtggttggatgtgtctataaggaaaatccccaagttattataatgtggttccaaggtagagtagatgagaaaaagaagagtaataggattgatcccttggtaactcgaacactctaaaaagttagagcatgagagaagagctaggcaagatgactagaaaaccaagccggtgagacaccaaatgaatagtgctgtcgtagaggctgagaggagagtgtgttaagatgggaatggaggaggcagagcaaggtagtggaaaagaaggctcctctgatcattctctgtgcaaggacaccaatttaacaactatccagttctttggtaagaactaaaaatcacgtgagcacctatagcacctggttttaacttcatatcactgaaaagaggcatggaagagatagaaaaaacagtcttgaatcgccgatgccacccctcacccaccatcctgtgtggtacagagagcatatctgggtgctgcaggagggagagcactgcaattgtaaggcattaaactgagctgtcctgccacagcagaaaggaaaactagaccaaactcagctgacactcacctatggaggcggcatttaaaccagccccagccagagcggaatcactcatcccagcagtccaaacttgagatcctgcaaaccttgccactgagggctaaagcactttgtgtctctaagtaaacttgacaggcacactaggccataaggactgcgactcttaggtgagtcctagggctgaactgggcccagaaacacagagacacagtggacttggtgggggcacacaacctactgagacatcagctggggtgtctaccggagtgctggcatcacccctcccctaaacccagactgcacagctcacagctctaaaggagaccccatccctccacttgagaagaggagggggaagagtggggaggtcttcatcttccatcttggataccagctcagccacagcaggataggtcaccagccagagttgtgaggcttccccatgccgcattccaggccctaactcccaacccccaatgacatttctagacacatcctgggttacaaggaacccactgctttgaaggaaaggacccagtcctgccagcattcatcgcctgccaactgaagaccccttggaccctgaataaccagcagctatacccaggtactacgtcaagggccttgatgagccactgagacttgctggcttcaggggagactcagcacattcccagctgtggtgggccacaggccaagtctccttcagcttgagaaaagcagagggaaaagtaaaggggacttcgtctctcaccttaggtactagcacagccacagcagggtagagtacccagcgggctattagtgtccctaattctgggacttgattcttgaatggcatttctggacctgtcctgggtcagagggagggaagcccactgccctgaagggtgagtcccaggccaggcagcattcaccaccaactgagtcgagagacctggggccttacaggaacatcagcaatagtctggcagtagtccttgtggcctgggatggtggtagctacagggtgaggctcctctgcttttggaaagcggacagaagagtgggaaggactgcatcttgtggtttgagtgtcagctcagccacagtacaacagaacaccaggtagacgtctaaggctttgactctagtccctgacttcaagatgacacctctggatccacctggagcctgggggacctcatcaccctgaagggaaggacacaggcctggctggctttgtcacttgctgactgttaagccccaggttcttgagcaaacataggcagtagccaggatgtggttacagtaggccttgggtgagactcagtgctgtgctggcttcaggtctgacccagtgcggtcacagtggtggtggccacaggggtggttgtgtcactccaccctcaactttaggtgactcagaagagaaactctgcttgggagaaagtaagggaagagaacaggagtctctgcctggtaatccagagaattctcccggatcttgctcaagaccatgaaggcagtaccttcgagtcttcaaacattcaaaaaaactgagataatatcaagcatcttctctgaccgcaatagaataaaactagaaatcaataacaagaggaattttggaaactatgcaaatacatggaaatcaaacaatatgcgcctaaatgaccagagagttaatgaagaaattaagaagaaaattgaacaatttcttgaaacaaatcataatggaaatacaatatagcaaaacctatgggatacagtaaaagcagtactcaaaggaaagtttatagctataagtgcctacatcaaaaagaggaagaactccacataaataatctaacaatgcatcttaaagaactagaaaagcaagagcaaaccaaacccaaaattagaagaaaataaataataaagatcagtgcagacataaataaaactgaaatgaaaatacaaaacatcaatgaaacaaaaggttgttttttaaaaagttacacaaaattgacattgccaaactaaaaaaaagaaaaaaaaagatacgaataaataaaatcaaaaatgaaaaacgagacattacaactgatattgcagaaattcaaagaatttgattcctagtatcattgttggatagtataggcaactatataccaataaatcagaaaatacagaagaaatggacaaatttctagatatatacaaccaatcaagatttaatcaggaagaaatctaaaacctgaatggaccaataacaagtaacaatatcaaagctataataaaaaatctccaagtaaagaaaagctcgggactgatggcgtcactgctgagttttaccaatcctcctcaaactattccaaaaaatagcagaggagggaatacttccaaactcattctacaagaccagtattaccctgatatcaaaatcagacaaagacgcatcaaaaaaaagaaaagaaaagaaaaaaaagaaagaaaactacaggccaatatctctgatgaatacttattgaaaaattctcaacattaccaaaccaaattcgctaatatattagatcattcatcataacaaaatgtaatgtatccccatgatgcaaggatggttcaacatacacaaatcaatgtgacatatcatatcaacagaatgaaggataaaaaccatatgatcatttcaattgatgctgaaaaggcatttcataaaattcaacatcccttcatgataaaaactctcaaaaagctgggtatagaaggaacatacctcaacataataaaagccatatacagcagacccatagctcttatcatactgaatgtggagaactgaaagtctttcctctaagattcggaacacaaggatgcccactttcaccagtgttattcaccacagtactataagtcctagctacagcaatcagacaagagaaggatataaagggcatccaagttggaatggaagatgtcaaattaccttgtttgcaagtgatatgatcttatatttgaaaaaaacctaaagactccacccaaaaactactagaagtgataaattcagtcaagtcgcagaatacaaaatcaatatataaaaatcagtagcatttttatatgccaacagtgaacaatctgaaaaaaatttaagtaaccccatttaaaatagttacacataaaattaaatacctaggaactacccaaagaagtgaaagattataatgaaaactataaaacagtgatgaaagaaagagaacaccaaaaaaaggaaaaatattccatgttcatggaatggaagaagcaattttgttaaaatgtccatactatccaaagcaatctacagattcagtattatcataaggaaaaagaacaaaactggaagaatcacattatctgactttaattttttttatttatttatttttttgagacggagtcttgctctgttgcccaggctggagtgcagtggcccgatctcggctcactgcaagctccgcctcccgggttcgcaccatactcctgcctcagcctcccgagtagctgggactacaggcacccgccaccgcgcccggctaattttttgtatttttagtagagatggggtttcaccgtgttagtcaggatggtctcgatctcctgacctcgtgattatattacagagctatagtaaccaaacttcagggactggcataaaaacagacacataaaccaatgataaaaaatagagaaccaaaaaacaaatccccacacataagcgaactcattttccacaaaggtgccaagaacatacactgggaaaaagacagcttcttcaataactggtgctgggaaaactggttatctatatgcagaagaaggaaactagactcctatctctcactatacacacaaatcaaatccaaatgaagacttaaatctaaaaccttaaattatatataaaaaaaaaacccttaaactacaaaactactacaagaaaacattagggttttccctagaacattggtctgggcaaaaacttcttgtgttataccctacaagcacaggcaaccaaggcagaaatggacagatgggatcacatcaagttaaaaagcttctgcatagcaaaggacacaatcaacaaagtgaagagacaacccatggaatgggagaaaatatttgcaaactacccatctgacaagaaattaataaccagaatatacacggggctgcaaacaactctataggaaaaaatctaataataaaaaaatgggcaaaagatttgaatagccatttctcaaaagaagacatacaaatggcaaacaggcatatgaaaaggtgctcaacgtcattgttcaccagagcaatgcaaatcaaaactacaatgagatatcatctcaccccagttaaaatgtcttatatccaaaacacaggcgataacaaatgctggcgaagatgttaagaaaagggaaccaggccaggcacagtgcctcatgcctgtaatcccagcactttgggaggccaaggcgggtggatccctggaggttggaagttcgagaccagcctgaccaacatggagaaaccccgtctctactaaaaatacaaaattagctgggcatggtggcacatgcctgtaatcccagctactcgggaggctgaggcaggagaatcgcttgaacctggaaggcggaggttgtggtgagcagagatcgcgccattgcactacagcctgggcaacaggaaggaaattccatctcaaaaaaaaaagaaaaaagaaaaagaaaagggaaccatcctacactgttggtgagaatgtaaattagtaaaataattatggagaacagtttggaagttcctcaaaaaactaaaaatggagctaccatatcatccagcaataccactcctgggtatatatccaaaataaggaaaataagtatactgaaaagatacctgcactcctacgtttatttgcagcactgtttacaatagctgggatctggcagcaatctaagtgtccatcaacagacgaacggataaagaaaatgtaggacttctacacaatggaatactattcagccataaaaaagaatgaatcatttgcaacaacatggatgaaactggagatcattatgttaagtgaaataagccaggcacagaaacacaaacattgcatgttttcacttatttgtaggatctaataatcaaaacaattgagcttatggagagagaggatagaaggatggttactacaggctaaaagggtagttgggggatgaggggaaggtagggatggttaattagaaagaatgaatagaacctattagttgacagtataacagagtgactatagtcaataataacataattgtacattttaaaagaacgaaaagagtctaattggattgtttataacacaaaggataagcatttgaaggaaggatacaccattctccatgatgtgattatttcacattgcatgcctgtatcaaaacatctcatgtaacccataaatatataaacctactatgtacccacaaaaattaaaaataaaaaaataaaaaaatagaaatgatcaaacacctagaatacagtcaagaggtcaagcaggatgagatcagagaagtgtcaactggatttgagaacatggaagtccttgataatcttgagcacaattttcatggtgaagtcagagtagaagtgttactgggatgccaagaagtacagactgtctgtctgtgactatatataactctttcaaaaagttctgtgtgaaaagaaaggagcactaaaaatgaagccagccatcttttaattcttatggattgggctgtcagtctcttcaccctctagagtctattttttttttttttaatgaatctaagcatgcctttactcaattcaaaaaaaacctctgccagctctttgcggccctcaaaatgaagtcctaaacgtgataatataacatggattcataatttaactccaattacctcccttgcctgagagcccttgtgggtaaactgtcaatttcacaagctctttctaacctccatgtaacatgttggtcagcctgctggaagtgtcttccttctccacctggtaagcctgtatttacaacccatgactcagctcagacatcctcctcaccagtaccatgccaggcacttacacatcattcacatctacacctccccagtctttattcctttaagccagaaacatgagtatcagccttgacttccacatccactcatgtctcatcccccataactgttcgacaaccaaggcccagctattctactttctcaataagcctccatccccactctagacccctccatatccccactctagacccctccatatcgccactctagacccctccatatcccccactctagacccctccatatccccactctagacccctccatatccccactctatacccctacatatccccactctagatccctccatatcccccactctagtgctctccgtatcctgaatctagacccctccatatccccactctagacccctccatatccccactctatacccctacatatccccactctagatccctccatatcccccactctagtgctctccgtatcctgactctagacccctccatatccgccactctagatctctccatatccccactctagacccctccatatccccacctccctattccatctccctccacttgttttccacacagcagccagaacgaaccttttaaaacacaaagcaagtcatattgaccccagaataaaaatccctccatggcttttcatgctcttacaaaatgattcactgggagacaaagccctgcaccgtctgagccctgccaacctctctaccctggctgagagtccacaggactctcccagcactgtgttctggccacattgaccttgcagctcctcaaagccactgagttcctgaaccggttcccccatctctgccacccctttcacctgccattcctttcaccttttacacccaaatttgaatgtcatttcctcaggaaataagcacagaacagcaacctgacccagtcttaggacactctgcaattcttcacggtgctcacggccgcttccaattgcatctgcatccttatgtgactattctataaagcttcacctcccacctttagactggcagctccccgacaagggtgttggttttgtgcaccagtcataccccaccctcagctgagaacccagcactccacacttattgaatcaatgggcaaatgaaaaccctcataatttgaccttctctaggcaccgaccagaatctgagtcctcaacatggagagtaaatgtaaccaggctcctcttccttaacaggaactcttaccagttccaggtacttgtctttctaccaacttctatacccatagagattggcatcctctctaatttcctaaactcatcagttatcccttcaccttcaaatgcttcaactgacagactattttaaagcaagagaaacataacagagtcattttggtcctggacagaaaccagttctttagatttatattgcttggcttaatactgaatacccagggttaaatgttcttgcatgcaattagagattgtccataagatgtcggaagcggcatctgaggcactctgcttctttatcgagtatttaaactaagcttggcaaaaccaggttaactgacaaatggtatagaaacaggaaagtactttcaaaactacaaaacaccaagcaacattattaacattatgatcgttgcattagccagtcttccacttactagaggaatataagtccatttttacatggctaaaagtagacttctttagtgaatgtacttacatatagaaaatccaaaagaactatctgtatcagacactatctgatagaagatttatctgaaaaaaattttaaatcatacctattaatatgaatccaggtgtgggctttctttctcatgtaagggacaaagggtctgtttgtacaggtggaaataactgccaaataggctgaatggcaggaacacaaaccctagggatccaggaagcagcctcagaaaacaccttctctgaccagatacctccttgaagaaaatgtgtattagtttaatcagtgcatacatcatcatcatggtacacaaacttctttgctttccttcctttcctctttctgtccttttagactcaaatataccaaccataagccttagcatccataacttttaagtcagtttctaaatatacacaaaccaaattaagaatcccctaccttttgttaacatttggggataccaggtaaaagacaaacaggaatgctttgtactgtactatttttgttaacttttctgtgagtttgaaattatcccaaatgatttaaaacttttttttaatttaaaaagattatcctatcattgaatattttaaaatattgccatgaccaagtttacagtttgaattttaaagctgggtctaacacagaccagaattacttcaattcatccaaaatttctggccacaaagttatttttatcaacttaccttcctagctgacatgctcagttacaagttacaagtgctgtctccagaatcatcaaacaccacccagctccttcaggggcaactgatgttccttcagctcgaggagctctttcacacactccaaggtgaaagtactcgctcaagattcacagaggtatggctcagcaagctgcaccactgccttcaaggctgaaatgtccacatctgtggcctaaaatgtaaaataatgtgacttaacacgtggaaatcaaaattaagctccacgtataaaacactactgacagcctgatttttttaaagcatgcaataggggcagggatgcttcttccattatggaagcctatccttccataaaggataaacatgagaggcctggcttttagctcatggaacttacattgtaatcaagggggtaaataaacaagatagtgatgagtaggtgacagagagtaactagcaggggtggtgatctggttttgctgggatggccaggcgaagtcacctctgcgctgagaatgaaaaggaagcagccatccaaagagcagggaagacgcaaaaggcctgtggtcgagaggggcttggccactgaaagagcagaaaggcagtccttcttgctagagccaaagggaggaaactgggagcaggggagaaacagtaagtgatgaggtaggagagaaaggcaaaaagaccaggacatatagagcatctggcgcttggattttacatgttctccagcaccatgagaagccataaagccaacacgggaccctcggtaaatgcaatgcattagtagttttaagcagagaaattgtacacttctcttttaaaacaatgactttgactgcttttagagaagtgatgggggcaggaggggtgggcactatcataacccaatgaaaaggccagaacttcaactgaagatatcagcataatccaaaacttaaaaactcacaaggaacagctgcaacccactgcctcgttcataatcactgcagtatgcaatgccattttctaaaggagctgcagcaacaacttgtatacacaccccctggtttaacattttagcttaacaggactttttgtggttcagttaacaaacactgagaaaaattcacagctgtaattggagtgcaaatttaatgtaaaaggcccagtcagttgaaaaataagattgtttttactttctgcaatgagacacattatcaaaagattaaccacatatctacaaatttactaggcaaaaatgggatagttttaaaatgcctctttggtttgagttacttaatgggctacaactaagaaggtaaaaaattaatggaaactgttgacttcataattaggcctcctcattttttaaatgatctcaaatacttcctccacttcataggtttataatccagttccccttgtcaaaggacgctgaaacttaagccactttaattccctggtagctcctcctcagctgcctttaaaatttgcggaacacttcctacaccatagcaattagatgtgaaaaacatgctatttcaatcagctcataaactttaattaaaaataagcactttggctctaagagtctgaagtaaagtgcttatagcttgagacaaatgtcttaacaacaaaattaactttacctcaagcagcaccttgagcacatcatgtgccagactgtccgccatccagatggctcaaggaccttctccaagaactcagctgtgaattcccgtgcctcagaggccttgcagtcaactacaaacaaattaaacacaggaagaagtgagaatgcataaagcagagggaagttaataaatccacttaaatccattttctcagaaccaacaactggcaatctgagggactgagataggcagtctgcttataaactaaaaagataaaaggagcaaaaaaggacaggcacggtggctcacgtgtgtaatcccagcactttgggaggccgaggtgggcagatcactagagctcaggagttcaagaccagcctgggcaacacggcaaaaccctctctttagaaaaaatacaaaaattagccaggtgtagtggtgcatgcctgtagtcccagctgctcaagaggctgaggtgggaggatggcttgagccaagaagcagaggtcgcagtgagccaagatcgtgccactgccctccagcctcggtgacaaagcaagactctatcaccaaaaaaaaaaaaaaaaaaaaaaaaaagcagaaaagaaacaaaaaagagaacctactcacctaaaatgtagtcttgataggccctggattactcacagagtaaaagttgatttgtttgcaaaatttctaggtgaagtggcttttttccttctggaataaaactttgtaaactacaacctggctcatcaagacagttacaatcactgcgtgaatcttcattttgaaagaaacctaaaaaaacaaaaacgataagcaggcacaagtatcccagatacttccagtgctcgtagagtgcttctgtcttcacatccttgcttgaaattccaaaccaacaaggatttgagtatgaatgctctatttatctctattattgtcagaagaaacagctttacgaacttaaaaaatatctgaaaatccaagttctacttaaaaacagtaagagcttaagatctttcacaagttaggtttttgttgttatgtggggatttggaggaaagcagagaaataaggttgttttttaatccagtggaaaccacctaagttcttctccctagaagtaactatctttactatagttagtaagttataacagtcaagtatctgttatttttttttctcccaaacacttccacaaagcagcattaaaagagagagctgatttcctatactccctctccaacgggctgaagcctctctttattttctacaatatcagtctgccaatggctcctcaataaacagggatgagagattcttaataatgcataaggtttacttcactaagactactaggttcctcctcattaatttcaatgactgtgtctaaggaaaagatcagaaaatgcaaatcacattaggtttgggctgtatgtaattatgtttcataaggcatgattcagccagtggcgtatctaattctgtgtaataagatgtttttaaaaaacgaaatgacggctgggaacggtggctcacgcctgtaatcccagcactttgggaggccgaggcgggcggatcatgaggtcaggagatcgagaccatcctggctaacacggtgaaaccccgcctctactaaaaatacaaaaaattagctgggcgtggtggcgggcgcctgtagtcccagctacttgagaggctgaggcaggagaatggcgtgaacctgggagacggagcttgcaatgagccaagatcatgccactgcactccagcctgggcgacagagcgagactctgtctcaaaaaaaaaaaaacaaaaaccgaaatgaccactaaataagcaatgctgagggtagcacttagactggcagagtagtttccgaaggtggtttcaaggaaggtgtctgagacggtaattagcagcagtctttcttcctccaccacctttgattttctcctttccctttctccttccttccattcctttgtcccagctcaggcccccagaattacttgatcccacacatgagacgatcaaagcaggcaagggtctactactgttcacaaacactgacacgcatgagccttagagggcatcaacaccttactggctgtgtgacaatctctctgtgcctcagttttcttgcctataaagagaagataaaaatagtatgcttacttcaattaaattaagagaattaaagaaattacttgttaaccatttactacagtgccaattacacagtatatatgtatatttgttaaatataccttacttcggcaccactctttacagctattttgtttttccagctttactgaagtaaataaaaatattgtataatctaaggggtacaatgtgatgttttgatatacattatgaaatgattgccaccataaagcaaattaacatttccatcacctcgcatttgtgcgctgagaacacgtctcactctcggcaaatttcaagtacacagtagtgtcattaactacagttaccaagctgcacactagatccccagaacttactcaactttgtactctttgacccacatcttccccatttctcccacttgcagcccctagcaaccactacgctgctctttttctctcagttctgctttattttccacataggtgatattatttagaatttttctttatttacagccactttaaaaatattccccttcgcacagtgtttcactgcgtcttcaccacaaggacagccactggctccgtctttagatgggaaaactgcggcccggcgacttttgctagttggaaaggtgggtcagtggtggaattaagtcacacttaggccttttcacttcgcagcggctctttccactacacgatacaactgaacgtgttaaagtaaaaacgtgacccagtttaaaatgtcgggggcgggggaacggaagcggggggaaggaatctacctgaggagtgaggaggcagaaaggaccgagaacaaggggacccggttccatttctggaccccgtccgcaggctgctcgcccgacttggggtcgctctgccccggacgatcaggacagctgcgtgggcccagggttccagctgcctttatcttcgggagagcgaatggctcagatctccgcggagatggagctggaaaagcggagccctcgctccacggctcgcggcagttccttgaagcccacccaggtggggagcccctggcgcagcccaactctctgcagtctcggggaagctgaggcagagagggaagccccgccccgggtccttcccgaccccgacgtcctggcccgccgagtcccaaggccccggcccgggcgccccccgaggggccggacgcccaggcctcactagggagcggctcctggcccggcccggcgggcgctcacctttctcccgggcactggagcctccctggccgcccaggtgcacgcgaccccgagactccgtctcccggccacccagtcaggcacttcaaattcccgcggacggcgcggcgcctctgattggacgggcggccgagctcgtaccggtgagagccccgccccgccgccccgccaagcgccccctcccggcaggcggaccgctgctctcgctcaagttctggcgtggggctgcgctggagcaactggggcgaagttgaactgggacatccttggagatgatttttgaaaaacgagcaagccatgcctggaaatgagggagagtgggaaagacactggattgagagtcagaagacatggtgtttagacggacttcggccattcctaggggcactgccttgggcaaatcatttcccctttcaggcgcacctcacctgtgccaggatgctggcacacacacagtgtattttcaaagaatgtcaaatgtagtatttgtttttattattgatcaaaggcagctgtagcttccaataataatggctaacatctaccgagtactgtgtgcgagacacccttctgcatgctttacctgaattaccttatttaatcttcaaaaaccatcccgtgagagaggaactattattatacccattttacagagaactaatagagacaacgagaagtgaagtgacttctccgatctaactaggcaaagccaggaggtgaaatcagccagactccagaagaaaccctttagtgcctctgtcaggccctcacttgccaggctgatgagagcaacctgagatggcccaggtcaccaggacaccaggcggggtgagtccacaggaggccaggagcctggacatgacacccagggcagccttctcgtagggaaatatttccacttaatgctttgacggaaaacctgggctacagtctctcagatcccctacagctgaaataaaacggagccaggagaggtgattgtggaaacctgcacttaattcagctagctttgccaggaaacaagatttctttgacttgtgtgcagagtctgaccttacatttatttgttcactgaacaaatatttattgagcaccataaggtgaaaacacaaaacaataaaattaggactaacaacgggccttgaggactaaggtagctttttcataattttcccgtttaaccctcccgcccataaacctcacaagtggcagcatttctccttacccattttcatcatcactttagacaacacagctctcttcttattcaattaccaaatatttcttcaaacatcaagatattactcaaaccagtgcttctagaaaattatttgaaagaaacaggaggcaacagggtcagacagaataccaatgctattgcaaactccataaaggagaaactattgattacatgggatacatttgctagacacagcccttctcatttccacaccggtgtcaccacatattccctacttgttcagattctatcagaggtttttagagtctctccctaagtggagacctgttagaagcacatatgtcttgtgagttttctttccctgcccctccatatcctaaagaaaggatttttcttcttcctccttttcaatctcttcccttgtagcctatcataaccttctactcgccctaaggtggacatcacctactgctattccatcttttttatatctttgctctttttatcactactgggtccttactgtgtttaaacatgggctcacaaatacctgcgctccccctaaaaccttcccaaagcccaacttcaaccctgagaaactgcccttttgcttcccttcttggtagccccagacttttcagtacagtgcctccctctcctgctttcttgaaggccagcagcccctcctgaggcccccaacttccaccccacagcactgacctggctgaccacccacctgtgctctttcctcccttgccctctgcgtcctctcccttgatctccagtctagttctctgactacagtacctgggtgaactgtggtctgaaaggattgaatgaaaaattccagaaataaatgataagtttcaaattgtgagctgttctgagtagcaagactcattcctttgtccacaagtgcccacactgtatacgctacccatctggtagtcactgtcaaggccgaaggaaaacttctcctttacccttgaaggtttgttgaaaatcaaccaacaaaaggcagattaataagagaaaaggcatacaaatgtattcacatgcacggggttggggatatcacacaggatgaccgcaccaggcagtggggtagaggtggttgtacacccttcttcttagggcaaagggaggtgaggaagtgtggatgattgaggggtatgaggggagaattccatgggcttaaagaacatacaatgacctgggacaaagtctgttgagcccacagagcagacaatggtttatgacaaaagtccgtccaggggtattgaaaaactcccgtctttcttcctgcaatatacattcagttaattaaaattcagggaagaaacccaaggtaattgtttccttctttggtgggtcagactttaggcagaaaaaggaacttcagagaacttcatctgtgctttgtgagagacagaggattggaagacaggatagtgaaggtcagagagaccttgaggctgcttcttcagctcaccatgacaaagcactgtggtttggggtatcagtttctgggccccaatatcactcagtggccatctcaattatcagatcaaaaaagcatagtatagtatatacagggtttggtgggtttggtactatttgtaatttcaggcattcactgggggtcttggaacagcacagtgggagtacagtagtgttcccaaggataagggggcactactgtactctttcttgcccttgtttttcttcctgtctctcagattctctaaacctaggtgattcccaggggcatatactacagaagtcctagtacaggttatggtgattcatgcaagaaagtagatttgctcatttatttgtcaaataataaatatatatatagaatagactgtgggccagacattgttctacattctagggtaacagggcaaataagacagccaacatcccagcctgcacatgatgaaaaagtaaaaaaaaaaaaaatcaattcacaagcaaatttcaattataaaaaatgcaaaaaataaaagaaattcaatgatgtgacagaaaatgaagggggaacaaattcagattttatgcaaaacacttgattttaaactgttagcaactaatttttaaaaaaattaaataccatgtaagccagaaaaacttcacttcctgggccaaattggcccatggcccaccagattgcaatttctgttccaagctccaactactgaaaatgtagtccagggaccaggagattgttagaaatacagagcccctccctccctccccaacccatcccccagagctgctggatcagaatctgtgttcaacaagttccacagtccccaagtgacatcattcacatttgatgcaaaggccttcagaactcatgtctttcctgaggctgtttaattttcatattcctgctggaaaacttgacctggggttcttacctgtggttcacctccacctccacaatgctgcaaagccacacctaagcacagcccatcctccagtttagatgtctctcaccatgtcccactccccaaccacggcctgtgtgggccgccaccatctcccctagggctgctggggcagcatctaggaagtcacactcaagcctccacctgccccagcccttcagaattgactgctctcctcttgctgctcctggtctaggggtctcaaacttaaatatcgaaagtctagaccaaagacacaaagcagagaagtgagtgctgctctttctccagtgggcaggagatgagccaatgttgccacgtgggccttccaagagaagccataaagctaaatgtagtgagacaatttccatattaaaatgttaacatctagtttttaaaaattcaaacagtatgcccaccaaataaaacctatctgcagaccaccagtttgagacatctaagacctagtctgcatggtgcattgtcacagaggctgtgcactctttgaaggcaagaaacgtgtcatgttccttattgcgttgctggcacctaccactaggacggatttagtaaagggaaaaactaaattaatactgtttgtatctgtgtgtgtgtctgtcctttttcttttaaattttagattcaagggcacagatgtgggattcttgcaaggacatattgcatgatgctaaggtttgggtttctattgatcctgacacccaaatagtgaacacagtacctgtatttttcagttttcgcactgctataaataaccacttgagactatgtaatttataaggaaaagaggtttaattgactcacagttctgcatgactggggaggcctcaggaaacttacaatcatggaggaaggcgaaggggaagcaagtcacatcttacatggtggcaggagagggagagagaaagaaggagaaggagaaagaaggaggaggaggaggaggaggtggagaaggaggaggaggaggaggcagcagcagcacatacttttaaacaaccagatcttgtgaggacacactatcatgagaacaggaaaagggaaatctgcccctatgatccaaccacctcccaccagttccctctcttgacacatggagattacaattccacatgagatttggatggggacacagagccaaaccatatcagtacccaataggtagtttttcaacccttgccctcctccttttcttccactttctggagtaaccagtgtctattgttctcatctttatgtccatgtaaacccaatgttttgctcccacttataagtgagaacatgcaatatatgcatttctatttctgcattagtttgcttaggataatggcctccagctgcatttatactgctgcaaaggggatgatttcattcttttttattgctgtgtaatattccatggtatatatgcagtacattttctttatccagtccactactgataggcacctaggttgattccatgtctttcctattgtgaacagtgctgcaatgaacatacgagtgcagttgtcttttaggtagaatgatttcttttcctttaggtatatacccaataataggactgctgggttgaatgattgttttatatttagtcctttgagaaatctctaaactgtttcccaaagtggccaaacattcctaccaacagtggataaatgttctctctctttttttttttttgcaaccatgtaggctgctttgggaagtatggctattttaatgatatccacttttccaatccatgagtatggaatgttttccatttgtttgtgtcatttatgctttctttcagcaatgttttgtaattctccttgcagagctctttcaccttcttggttagatatattactaggtatttttttgtgtgtggctattgtaaataagatttcagtctttacttggtaatcggcttgaacattattagtgtagagatatgttactgatgtttgtatgttgattttgtgtcctgaaactttactgaagtcatttattgggtctagagtctttgggcttttggtggagtctttgggcttttttaggtgcaggattatataatcagtaaagagagaaaacatgactacttcttttcctattttaatgccttttacttcttgctctttccttattgctctggctaggacatccagtactgtgttgaataaaagtggtgaaactgaatatccttgttgtgttccagttcctaggggaaatggcccagcttttggccattcaatatgatgttggctgttgctttatcatagatggctcttattattttgatgcacgttccttttatgactagttatttgagggtttttatcatgaacaaatgctggattttatcgaatgctttttctgcatctattagataattctatagtttttgtttttaattctgtttataagttgaatcacatttattaatttgcatacattaaactaactttgcattccagaagtaaagcccatctgatcatgtgtgaactaagtttctgatgtgctgctaaatttagtttgctagtattctgttggggacttttgaatgtatgttcatcagggatattggcctgtaattttatttttcggttgtgtctttgccagattttgatatcaggatgatactggtttcatggaatgttttaggaaagaatccctcctcttcaattttgtttgaatagtttcagtgggattggtactagctgttttttatgtgtctggtagaattcagctgtagtccagggctttttttggtgagtagttgtttttgtttgtttgttgttcttgtttgtttggtagtgagtttatttccatgtttagaacttcattaagcatctcttgtaggcctggtctggtggtgatagattccctcagctattgtttttctgggaaagactttacttctgctttatgaagcttagtttgtcagcatataaaattcttggctggcatttcttttctttaaggatgctaaatatgggcctcaatctattctggcttgcaaggtttttgctgagaagtctgctgttcatctgctgggtttcccctcatagttaacatgacccttttctttagctgactttaagatttttttctttcacactgaccttggatagtctgactacgcgccttggggataggtgtcttttatagttatcttgcaggagttctctggatttcttatatctgcaggttgacctctacagaaaagttggggaaacttccctgaattatattctcaaatatattctccaagctgcttactttctcttcttctctctcaagagtgccaatatgtcttagatttttattgctttacataatctcatgtttctcaaaagctttgttcattaaacattttttgtctttatttttgttggggttgattcaaagaaccaatctttgaactctgagattctttcatctgcttggtctatcctgttgctaaggttttcagtgtattttgaagttcctgtagtgaatttttaaaattttcaattccaaaagttctgtttatttcataacataattatgttgtctttcaaatcctgaatcacttttctgtttcctttgtgttggatttcaactttctcttagatcttgttgagtttctttgccactcacactctgaattatatttctgtcatttcagacatttctttttggttagaatccacttcttgggagctagtaagatactttggaggtgacaaaacactctggctttttgtattactggagttattgtgctgatttcttctcatctgagaaagttgacactttatttttcaaatgtgctaccatttggatggggcattttgatttcttattgttttttcctttgagaatttgactgtggtttatgttgtgtatgatcaattggctttatgtctgagagctatcagagggcctgggttccttggttgcagacagattcatatggtggctttctaggaaactgcttggtgtagcaatgtgttttcatttggtgctataattcagactgcagtcaagtcgatggcacttcagggcaagagccagcaggagggtctcactttgcctgtgctcaccctcagcaggggtggaggcaatagagacatacgagagcaccctcccccagcactgctgttcttcagcagaagtagaggcccttgagaagctcgagaagtgcctctttcagcccacgcttcccgggacccaacaggaagatctatggctgcatccacagcaaggcactgaggagaaacaggggcaattagacgacctcctctccaagtttgtttgtaggctttggtgttaccccctccagtggttggcactgcgcttccatttcctttgacccaagggaagctttgacaggctgtgttcttacttcccttaaaggctgtcctcaccaagggttaggtctccagcgcaggtgtgcggggcaggtaagggggagggtgcctcccttccactcctcaaagttggtgggtcacactttgccagctgatcaagggagcaaactggggcacccagcaaggatacacactgactggttccagatcataaagctgtccttggctgcaagtcctcctgctaaggagaaacctcttcttcagcacttctcctgcggcagccccctgtaacaagagagtctaatttaactgcctgctcctggagtggtatccacactcaccactcaattctggctgtgggggcccttcccctgctccagggcaaatggtctactctctggcctgagactaaaatgtctgcagaagacattattgccaggttgccacacaatgactgccttggtatgagcccagattaaaaatagtatcatcctctcggtcccaagtctgggaaaatgccagcagcttttcccagtgtcttccctccctccatctctcagcctcccccaagctagctccggggcttgagaaaaaaggggtgctctgtcttggcctgggttgcacagacccctagcagaaggatgagacacagagggagacaggctgccacccttgcagacaagggctttactcactggtcagccaaatgctgtcatggaagctgcttgtgcgtctttccctccccagagtctggtgtgtccttcactagtctggtgaattcctgtcttccttcttgagtgaaaattcacagagttgatctttaagcactatttttctatttccctgtggctgtggcatgcggaaagcctctcatctgccatcttcatcattaccggattctctaatttactgcttgttttcccttccttccttccttcctttgcattctcttttcatcaccaacatggtctctaacccctagtggacctttcagatagtggtttgcctatggttctttttatatataacaatacaatgtcattagccgaataacttgggtttagagtctagcagccagggctggggccatgctggctgcttctgcccagatgcttccaggaagcagattcaacattgacatcattacccgagtcagggtcagtgaaggctgattgtattggtgaccctcttccgcctgcaaatatctcaacagcttccctaagaacaggaacagcctttcgggtggtaactaacagcgtggctaagggctttgattccctaggagacaagtactactgtaagtcattattggacattcatgtgaatcaatttcagagagcaaatatggaccagacagacagcacatattctgaacagcagagaaagggaaagagggcccctgattgtaggaggggtcccattggggtaaggcttgtctctctatctgcagctgtatagagctccacatgggcccagggtgggcctgagcaccttccataagaaagaaaggtagcccacaactcccatcggcttcagggagagaagagatactagctcactgctactgatttgagtatctagggcttcccataatgaaaacgaaaccaaagaaaagccaggcccaaatcttggcatgtattttccactagagggcagcttaaactttcaaaataaaataaatcttgcacactttgtaaagtactatatataaaatttgtatgtacacatcatgtaaaactaatgttcatattctagtctttgcaagcctgtacaagcaggtcaagtgttcaattccatatgtctgaatgtatgtatcctaggaaactagtctaggatacaactgaaaaattctgaagaaagttaagaagagaagtgccaatgcccagtgatctgccctctcagtccaagtcctgccctgcacgacccagtgtttatgtttttatcaggcctatggagagaacacaggtcagtgtgtctgcttctagctatgatgaggaactgaagttaaatttaccttcccactataaggaactagaaaaccagacaaaatatatgaaacaacagtttttaaacaatgatcacggcagggctgtgatccctaagagaagacaaacaaaagttgtgagtactgtaatccccctggctttctgcctgcaggcgcctctggactgcagaactggaagggggagtttcaacagagcacagcatctcaccgagttagggaaagagagatcagtttggagagacagtagtggctggaatttttaaaaagaagaaccaagagaaagagctgatttcaaaaagagcttgagaaatgtttagaaggttgccactctagtctgattctgaatactgagccacatgttactagggtgaaactgcatgggctgagccaagagttaaacgatgaccacaactcacacagggatgggagacatggagttcagacaagccagagcggtgacccctcaaagacaactatctaaagtatataaagcactcacagaactctgaaaacaacaaacaatgaaagacaaataggcaaaaaacataaatagacatttcactgaagaggatataaggatgccaaataagtacatgaaaaatgttcaacttcattaacataagggaaatgacaaatgaaacctgatggctcacgcctgtaatcccagcactttgggaggctgaggctgctgaatcacctgaggtcaggagtacaagaccagcctggccaacaagggggaaaccccatctctaataaaaatacgaaaaaattagccgcgcattgtggtgcacgcctgtaatcccagctactcaggaggctcaggcaggagaatcacttgaacccgggaggcggaggttgcagtgagcggagatcgcaccactgcactccagccttgatgacacagcgagattctatctcaaacaaataaataactaaaaccataatgaggtattactacacacatatcagaatgattagaataaaaattagcagaagtagcataatgctgcgatacagagaaactggattactcaaacattgctggtgaaatgtaaaatggtacaaacactctggaaaatagtttggtgctttctaaaaaaaatgaaacatgtaagtaccataagacacataactgtattcctgggcatttatccctgagaaatgaaaattgtgtttatacaatcacctgtacactaatgtttatagcaacattagtcataatagccctaaactggaaacaacccagacgtccttcaataggtgaactgtcagacaaattgtgatgccttcaagccatgtgtataaattagacttctccagagaaagagaattaatataagattatgttggtgggactgtaaactagttcaaccattgtggaagtcagtgtggcgattcctcagggatctagaactagaaacaccatttgacccagccatccctttactgggtatatacccaaaggactataaatcatgctgctataaagacacatgcacacgtatgtttattgcggcactattcacaatagcaaagacttggaaccaacccaaatgtccaacaatgatagactggattaagaaaatgtggcacatatacaccatggaatactatgcagccataaaacatgatgagttcatgtccttcgtagggacatagatgaaattggaaatcatcactctcagtaaactatcgcaagaacaaaaactgaacaccacatattctcactcataggtgggaattgaacaatgagaacacatggacacaggaaggggaacatcacactctggggactgttgtggggtggggggaggtgggagggatagctttaggagatatacctaatgctaaatgacgagttaatgggtgcagcacaacagcatggcacatgtatacatatgtaactaacctgcacattgtgcacatgtaccctaaaacttaaagtataataataataaaattttaaaaaaagattatatatagagggggtggggggagagagagagagagaagggggaaatttttagaaattggctcacacaattgtaggagctggcatttttaaactttgtagaccaaacaggcagactgaaaactcaggtaggagtggatgctgaagtcttgaggcaaaatttctttttctttggaaaactagtcttttctattaaggccttcaactatttatatgaggcccatgacattattgagagtaatatcttttacttaaaatcaactcattatagatgttaaccatgtctacaaaataccttcacagcaacacctatattagtgtttaattaaataactgggtactatggcttaatcatattgacacttaaaactgaccatcacaccatattcagcaattaagaagagcaaactattgctatacataagaaactgggcgactctccagtgaattttgctgagcaaaaaagccatttctaaaaggttacatactgtataattccatttatataacatttttgaaatgacaaaattttagaaatagaagagtaattagtggtagccagagtgggaggaagaggtgggagtagataagaagaaaaagaaggagggtgtgtttatgaaattacaacataagggatcctcgtgatactggaactgaccagtatctgaactgtggtgttgaagacatgaacttatacagattctaaaataatataatacttaatccacacacacaatgagcacagcaaaattagggaaattggattaaggtcagtagattatatcaatgtcaatatcctggtataatagatactatattatactatattatagtgtataatgagcataattttcatttctcagggataaatgcccaggagaacagttgtgggtcacatggtagttacaggttttatttgttaagaaagtgacaaactacttttcagtgtagttgtaccattttacacttccagcagcaatgttggagtgatccagtttctctgtatccttggcagcataacactatgccacaacatagtatctgctatactgtattatagtatattatatatatactatagtatagtatatattaatgtatactatattatactatagttttcaaatgttacaactggaggaaacaatgcaaagtgagcggaaatctctattattttttaacatcaactttattcttataatttacataaataaaatgcagtcactttaagtgtacactttaaaagtttcaacaaacatatacaattgtacaatcatcaccacaacaaagatataaaatattttcatcatcccaaaagagtcccttgtgtcacttcccagtcaaccgccttctcctaaaacccctgtttccagcccctggtaaacattgatctgctatcattataaatttgtctttactaggtttcatatatgtagaatcatggagtgtgcatactgtataattccaactacatgtcattctggaaaaggcaaaactatggagacagtaaaaagatcagtggttgctgagagttacgggcagagagtgggatgaataggcagagtagagaggatttttagagtagtgaaattttttgtatgatgctataatactggatacatataattacagtatacctttgtcaaaacctatagaatgtacaacatcaagaccgaaccctaatataaattataaactttaggtgataatgatgtggcaatgtagactcagttgtaacaaacgtaccactccggcagacaatgttgataatgagggaggctgcggaggatgtattaatacaagggaactatctgtactctccacttaaatttgctctaaaaaaaagtatttttaaaaagaaaaagtaagaaaagctcagagcctaccagactcataaatgttagtgttcttcagggatggcctcacttcttttatgtctctgttcttaaaaaaactagataattttatccagtcaacccagcaatgtccttgttgggtatatgcccagagcaacatacactgttctaccagaatgcatgcccacaccagcattcaccatagcagagacagggaatcaaccaaggtgcccattaatagtggactggataaagaaaatatggtaaatatataccatgcaatactacacaccatagaaaataatgaaattatatcctttgccactggaggccattatccttagtgaaacagtgtagaaagagaaaaccaaataccacatgttttcacatataagtgggatctgaacattgagtacacatggacataaagatgggaacaacagacgctggttgctacaagaggagagagggttagatggggggcaaagttttaaaaactacctatcaggtgctatgctcactaactaggtgatggtattattcataccccaaacctcagtgacatgcaatttacccacgtaacaaacctgcacacgtatcccctgaacctaaaataaaagttgaagaaaaaaagaagccaaaaagtgtgttattattgaataaaagaagaattttgaaatgacttatagcactctttccaagttttggtcccctgtgttagaccttaaggtatcaatacgctcttaatattataagaagttttgatttttaactcagagaagttcaacttttgttgtgtcttgctgctttcagctttctatcctcttgagaaggcctgagaggataactttctctttgtaactttttcatcagtgtttgtaacttttttccccctataactctaaatgctgttgaggcctgatgcaaaaatattttatcttaaaggtctcaaaggcagtggtttcctccagtataacttgattctgcactcttgttttttcttaatatatctaaattgtttcatgaacaggaaaacttaactcatgactgggagtaatttgagtattctttccatcaggtttgaattccaggtgatctgaataggcttctcataagtggaagccatcactgcagagggtcttccttcgactttggtaactggcctaagaaacagatcttatgttttattgagataattcctacgtcatcattattaaattttttatttgcttaggaaaactgagatttaaagaaaaattaaggcttttacacctatataacattctgtattgattttaaaatccttgtgctgttaagttacaggactttgactcctgggtcttgaaaaggcaccaattcctgttaaatcttgaacatttaaaatgcatttgtgagacacagggccagaaattaaacttattcaatctctctcagcccagggactactatgaaagaggtgggcatgtaagattataggggcttattttgagagacaaaattagttcagagtttctctgtaaattaaacatttttatcaaaagcacattgatgcaaggtcagcatataggtccctgtgttggaatagcaaggtttccttgaggcattaatctgctccttaacttaaaaaaaaaaaaaaaaaaaaaagcttataaaagatttatggaaattatatcttatcaagctgactaaaattagatttgttcataaggcttatttatattagcttaaatattagtaatacattatatgaaggtaaattttaatttttagttttctcttttgaacaaaacgtttgtgtaatattaagaaatagtaaaatgtttttgtttgccctttgagtaaactacaaaaaaaaaaaaaaaagaaaaaaaaaaacaagaagggggagagagagagacagacccagctggcctcatggtgtctttattagaccttattatttgggaacctgagtctcttctatgttaagagtaaaagtttctgcctttttgaaatttttgagttatcactttggctaactgaataacttattttcagtaacatataatgccattttgcaattttaagtgttttaaacctttgttatttgacaaatgctccaaaatcaaattctaaattcagtcttttggccttaaactaactttttagaagtccagcaaagacatatttgtcttatttggtataataaaatcatacaggaagcattgtcaaatatacgaaggtgtttaactttctttgggttatatttatataaatgtcttattagtatgtgcttcaaaatcgtatgattcctacagttctaatatgtttgagtatatgttatcagtaataattataattattatgttaaattgttgtatgttacaaaataatcaaatttccttgtcaattgtatctctaacaatgacagttctaagattttgccatccacaaatattgtattactttaatccttttcaaaaagtagtttttaacttcagtgagtgctcttaaacacaggtttctgataattttggagactgtgttgttggaatagaaaaatataacttccaggactctaattaaaaagttaatgtgttcatgagaattgtcaacacaatatcaactggaatgagttaattgggcttgatggtttgaaaaaatctaacctgagatttattgtattaaaatgttccagtaaagccaattttaaaaagaagcctatatggaggatagtttttcttgctggaatttatgcaaataatcaggccaagtataataaaactaaaacattttttttttcaaataaattagtcctgctatgagttgtctttggtaaaaatggagaactgaaagagacaaattatctttcaaaagaaactatagtatatgtgttattacattctagtcttgttcactgttttttcagtttttattattttctacaatttggaccaaatcctaaagttttcctggctacaagttttccaaactaatgtttttaattttttcctttcttttttttcctctaatttgtctaatttgaaatcaccagaaattaaagctgtgtttttctcaaagcactgtgaactgaagctaaacaacttaggaagaaataacaacctatttatatgtcctaaatcagttttccaggattcttttccctttttgttgttatgatctttcctccctcctttttttccccattttatttctctgttcttctcaatggaatgtgagaattcacaacctgaatgagccttcctaacaatgtggacttatccatctaggaatgaactatcctagtggtgagagatcagacaaaacccaataccacagattcattttcatctaaaatactttctttgaaagatccttttaaatagggggaaagtgataaagaaaaactagaatgttggaaccccaaattaattatgccaaaagggaaaagttagagcctagaagctgagttattaaaaacaaaacaaaacaaaaaactgcctttccttttgttcctaaaccgattgctacagatagaatgccacatgtctccacaaagggcctccctcatcctgacaatgtaaattaacagcttatcttcatggacacaaaacaagaggagactggaaaccgtcccaccacccaccccaagacaaatgcatacttgactgcttcctctactcaatgtttactttatcttatgtaaagtgcacatttaccgaacacgagatgaatgcataattgacttttccctctacgtccgccttttcacgtgcaacaggtggattcagttaacctaacagaagcctcacaagaatgtgaccatatccttctcttttctttctttccctttttcccttctgccacatttaccctttaaatattgaagccatcaaaaccttcctcagaaaaagcacaggccccagatcctgttgtagcttatgtctgtttttcccaggtacatcgtcagccttgacaaaatacatctctaaaatgataaagactcgcctcattttttctgatacatatgaaaagagggtctatatttacattaatctctgagtgttcttggcctcattgaagacccacttccaaaaattagacaccttctcagaaattgggaggaatataattttttgcttcaattctcaccaaactgcccagaaacctcctgacatcttggaatgtcttttaagaatcccaggtatcccagtaaccattttcacatacaatacagctggactggctggttcatgatgtaaatagacctgttctgtcacccctactccatcactgctgtcacacagacattcctcctcccattctaaggaaaggtctttataatgtgacaacaccttcctcaggaagtctcccagtccttatttctgagtgagcctcatatttcattatttttggaggatattcctgaccagctggggtgatggtaccctaggagaaggtatcattccatactagtcttgagctcagaagcagatccgggaggaattgtcccttaagcactaagggtttctactcttctcaacccatattcattccttagtttatcccacccagtctcgtggctttaaactccatctacatttttcacttttgaaagcatgctctgtggaccagtagcagcatctgggagctggctggaagtgcagctttccagaccctgccctcgtcctacaaaatcagaatttgcattttaacaaatccccagatgacttaccagcatgtggtggtgcgttgccctatgcctggtacctcccaagttatctcctgtcctgatatctgccccagccactctgcagctgcttacatcacagttcagcttgaaggtccaccagacatattaaacatatccaaaatcagattcttagtttctgctccctaaccctgccccaccccctgccttccccattccagcaattacccttatccagttgttcagaacagcaatcttgtcattatccctgaagacttccctcatacgctatccaatcccccagaaactgcttccatccacttattaccacttgccctgctgcctgtccaaggcaacatggcgtctgacataaagtgatacaatttcctccatcttgctacttccagtcttaccaccacagcagccatcatgatccttttaaaatgcaagtaagaacagttgctcccagagtcccatctcatgttttggagtgctggtcacaggcgtcactgtggcctccagggctctgcaggatctgaatatgccctgagcccagctcatggccagccattctcccatgactcacagctcaccagccaaaccagctgctttgtgctccttgaagtgtgaacacatggacacactcttggccacagtgctagtgtggctcatgcttcatctgctcatgtttcttctttatggaggttttcctcaccacctcatcaaaacgatgcttctgcctatcctctagtcccattttctgttatttttttcacagcagttcttgccacctgacatttttcacatttatttacctatttatttattttctgttttcccaactaaagtgaacgtggtgctttgtggttttgctgtctccagtgcctagctcaatgtctgaaacatagtagatttttcttaaatatttgcttagtaaatgaattttactgctcagtgggcaccactcttacccctgagaaagagtcctatcatttttctaaataggccaggagaagaggtcctgactgctatcattaatcactagttagtccactacttttgcctaatggagtaaacatatcctaataactttttcccaatgtttgcttacaaagtcccttctggatcaaattcttatgttagagaaagaaaacagtgtaagatgcatttgaaagaaagcataattccatttgccttttattgccgcatatcactataggcctatggagtgaccaatacaaaatgaaaaatattctcctaatatttgtaaactttcacttagaaaaacttctcattccctgaactcttttcataccccgagaaaaaaatacttaatggtaaatgttttaaaaagcaagcttacatttacttgttatgagtggatttctctataagtcttagtatatatcagagaaaaaaacatgttctaaaacttctcaatgtttgctaacaaattcctttctgtgttaaacccttccaatcactaaaaaatagtttataattcttttgatcaaagtataatttcttacaaatgtttttctatataaaaatttttcattcactttaataaaagttaatgatatatcctaagaaaaactctttcttacatttgctttttattgctggatgtctttattggtagatgaaggccagaagaagtaaaaagaagttcaaattacatatatatatacacacacacacacacacacacgtatgtatatatacatacatatcatatatatgatatgatataacatatatatgatatgtatatccatatcatatatatatgttatatcatatcatatatatatcatatatcatatcacatatatcctatatcatatatatcatatatcatatcatatatcatatatatataattgattagaaaatagttttcttgtacaactcgttcatgcactgaaagaaaacagttgatagtaaattttgataaaagcaagcctgacattgactatttataggtggattgctctatcgtcctctaggccaggggtccccaatccctgggccatggaccactactgctctgtggcctgttaggaactgggctgcaaagcaggaggtgagtggagggtcagtgagcaaagctgaactccaactcttattgtgaactgcccctgcgagggttctaggttgcacactccttatgggattctaatacctaatggtctgtcactgtctcccatcacccccagacgagaccatctagttgcaggaaaacaatctcaggcctcccactgattctacattatggtgggtatgtaatgataatagaaataaagtgcacaataaatgtaatgagtttgaattatttcgaaattatctctccaccatatgtggaaaaattttcttccaagaaactggtccctggtgccaaaaagtttggagcccactactctagatggctattagcaaaatgaatatgttctaatacatattcctcaatatttgcttacaaatgccattttgtgacaaattctattcactgacaggaaacagtacatgatgagtcctagggggaggatgattacaaatttattttatatctaaatatctctctaagtctataagcactgaatgagaaaaaaatatattcatataacatgttctaaactttcactttgaaaaacatcttattcatccaaattttctattaactgaaagaaaagttaacaaagaatcatgaagaatgcaagcttacatttactttgtatgcacagatttctctattggcctcctggcataaatggacaaggacacatgttctaataacctattttccaaatttgcctaaacatgccttcctgtgtcaaactcttctatgcactgaaaaaaaaaataacttatgatgcatcctcaaagaagtataattacattttccttttattgctgggcatctgtgttggctgatgagggctccaaaaacccagaaatatattagaatactgtattagtccattttcacgctgctgataaagactacctgagactgggaaaaaagaaaggtttaattggacttacagttccacatggctggggagtcctcaaaatcatggcaggaggtgaaaggcatttcttatatggtggtggcaagaaaaaatgagaaagaagcaaaagtggaaacccctgataaacccatcagatctcatgagacttattcactatcatgagaatagcatgggaaagaccggcccccatgattcaattacctccccctgggtccctcccacacatgtgggaattctgggagatacaattcaagttgagatttgggtggggacagagccacaccgtatcattccacccctggacccctccaaatctcatgtcctcaaatttcaaaaccaatcatgccttcctaacagtaccccaaagtcttaactcatgtcagtgttaactcaaaagtccacagtccaaagtctcatcggagaaaaggcaagtcccttatgcctatgagcctgtaaaatcaaaagcaagttagctaattcctagatacaacaggggtataagcattgggtaaatacagccattccaaatgagagaaattggcaaggggatgcaggcccatgcaagtccgaaatccagcaaggcagtcaaatcttaaagtttcaaaatgatctcctttgactccatgtttcacatccagttcacgctgatgcaaaaggtgggtttacatgggcttgcgcagctccgcccctgtggtctggcagggaactgcctccctcccagctgcttttatgggctggtgttgagtgtctgtggcttttccaggtgcacggtgcaagctgtcggtggatctaccattctggggtcttaggatggtggctctcttctcatagctccactaggcagcaccccagtggggactctgtgtggagtctcccaccccacatttcccttccatactgccctagcagaggttctccatgagggccccagccctgtagcaaacttctgactggacatctaggtatttccatacatcctctgaaacctaggtggaggttcccaaacctgaattcctgacttctgtgcacccacaggctcaacaccacatggaagctgcaaggcttgaggcttgcacccactgaagccatggcctgagctctatgttggcctctttcagtcatagctggagtggctgggacacagggcaccaagtacctagaatgcacacagcatagggaccctgggcctggtccaggaaaccatcttttcctcctaggcctctgagcctgttatgggagagactgctgtgaagacctctgacatgccctggagacattttctccattgccttgggtattaacattacttatgcaaatttctgcagctgacttgaatttctcctcagcaaatgggtttttcttttctattgcattgtcaggctgcaaattttccaaacttttatgctctgtttcccttttgaaactgaatgcctttaatagcacccaagtcacctcttgaatgctttgctgcttagaaatttcttctgccagataccctaaatcatctctctcaagttcaaaattcctcaaatctctagggcaggagaaaaatgctgccagtctctttgctaaaacgtaacaagggtcacctttactccagttcccaacaagttatgcatctccatctgagaccacctcagcctggaccttattgttcatatcactatcagcatgtttgtcaaagccattgaacaagtctctaggaagttccaaactttcccatattttcctgtcttcttctgtgacctccaaactgttccaatatctgcctgttacctagttcaaaagtcgcttccacattttcaggtatcttttcagcaatacccactctgggtatcaatttactttattagtctgtgttcacactgctgataaagacatacctgagactgggagaaagagaagtttaactggacttgcagttccacatggctggggaggcctcataatcatggcgggaggtgaaaggcatttctcatgtggcagcagcaagagaaaatgaggaagaagcaaacgcagaaacttccaatgaacctattagatctcctgagacttattcactatcacaagaatagcatgggaaagcccggcccccatgattcaatttcctcccctgggtccctcccacaacacatgggaattctgagagatataattcaagctgagatttgggtggaaacacagccaaaccatataaaataccatatacgaaatttttagttaaaaaaattatctcattcattcaactattttattcactgaaataaagcagttagtgacagatctggaaaaaagttaacctacatttactgtttaaatttatgaatatcttttctggctgttggtgtctattggagaaagaaacatgtcctaataatgtcttctcagtgtctaagtacaaattatttttgtgttaaactcctctattcgttattttaaaaagaagttcttgatgcatcttatggaaagcatgcttacatttgcctctgattgcgtgacatctctataagcccataagagcccgatagggaataaaaatgttcaaattatataacacaaacctttacttagaaaaggatcttcttcttcaagctctttcattcactgaaagaaaacagttaattatgaatcttaaagaaagcaagcttacttttactctttataggtggattttctattggtctcttgctgtctactagaaaaagaaacatgttataataatttcttctttgtgtttgcttaaagatgattttttttcaaactctccatttacagaatgaaagaatactgtgatgcatcttaaggaaatcataattaaatttgctgttttttttctggatagctctactggccaatgagggcccaaagaagaaagaaaaatgtttcaataacatgttctcagttttcacttagaaaattatcttgttcataaaaatcttagacttactgaaagaaacagtgaatgatgaatcataaaaaaaaagcttacatttactttttatacgtgtatttttctattggcctattggtgcctattggagacagaaatatgttctaataacttctcaatatttgcttacaaacacctttctttttgaaacacttcaaataaaaaaagagtttattatgcattctaagaaaaccataattacacttctcttttattgctaaaaatgtctttaggcctacgtggttacaatgggcatagcaaaatgttcaaataacgtgttctaaacttttggttagaaatgcatctcacttatcaaattcttctattcactgaaagaaaacagttaatgattaatcttgcagaaaacaagcttacatttactttttataggtggatttctctatcagcctcttggtgctcattggagaaaaaccatgttctaataatttcttctaaatgtttacttacaaatgccttttagtgtcgaactcttttattcactgaatgaaaacagtttacaatgtttcttatgggaagcatgactacatttgccttttgttgctggatatttctgtatgtctatgaaatctcagtggaaagagaaaaatgttcaataacatgttctaaacttcactgagaaaagcatcacagtcaccaaacattccagttcattgaaataaaacagtaaataatcaatcttgcagaaagtaagggtacctttactttctatgggtggagtttttttgttttttggacttggcacctattagagaaagaaacatgaccttctcaacatttggttataagttccttttttgttaaactatcattcatggaaagaaacaggttataacgctttttatggaaagtatgtttccacttgcctcttattactgcatatctctataggcctatgaggtgtcagtaggaagaataatgttaatatgttctacaatgagaacacatggacatagggtgggaacatcacacaccagggcatgtcggtgggtggggggctgggggagggatagcattaggagaaataactaatgtaaatgatgagttgatgggtgcagcaaaccaacatggcacatgtatacctatgtaacaaaacttcatgttgtgtacatgtacccaaagacttaaagtattttatatatatatatatatgttctaaacttaactgagtaaaaaaatctcatttgtcaagtgcttccatttgttgaaagaaaacagttaatggtaaatcttgaagaaagtaagcttacatttactgtttttttggtaactttttttgaatcttggcatctattacaaaaagacacaagtactaataacttattctcaatgtttgtttacaaactccttttctttccagctcgtctatccactggaaaaaaggagttaatcatgtacccttaaaaaagcattattacttttttttttttggagatggagtctcgctctgttgcccaggctagagtgcagtggcactatctcagctcactgcaacctctgcctcctgggcccaagtgattcttccacctcagcctcccgagtagctgggaccacaggctcacaatgccatgcctggctaattttttgtattttttttttttttagtagagatgggggtttcaccctgttgcccaggctggtctcaaactcctgaagtcaggcaatccacctgcctcggcctcccaaagtgctaggattacaggcatgagccaacatgcccagccgcattattacattttttaaaagctggatgtatccataggtccacgagggcccaaatggaaaaaaaaatgttcaaataacatgttcaaattttttttaaaaagatattggagaggagaaaagccaagagggatgacctgacacggtgaagaggaacttctccctgggagaccagacaatcaagaagaccagtactccaagcagattgtcagaaagaacacattgagagtgtgtggaggaaggacacagacactaggctgaagagagagaaatgtggaaaccctgcaaagggttgccaagcaccaggacttgttcctcgccttatgcagctcttggggaaagggtgagttaaataggcatggagtggttcactctcaccatggacctccagaatcctagctgcagaagaccccatgatcccctggacatctcagatggcagggagagctgtttgaagagctggcagagaggggactccagcctttgtgtagcccaaagggtttggcatgggaacaactgcagtgtagcatggccagggatgcccatcccccaaggctcaccccactcgtttaggtagctttggcgtttcttggctgttggacccaagtagaacagagctaccttgcccatgggatggagccattctgatctgaacacccccgtctgccagtctctcctagagtccctgcctggccccacccactaacagtgcagcctcagatgctcaaacaaggtgtttcccagtggccaccaccataggtccttcactggaagaccacacctaactatcagagagcttctgttcaagggaccccaacagcacacaactgtccacagcctgccctgactgcttcactggcacacacttgcctgcagcatcctcccaccattttgatggcatgtaactgccccaaatctgccaactgctttgctggtgcatgttagtgtgtgggcctcaccatcctggtgccatcagtgtaaatgtatgcacagatcctgctgagccaccaccctgccactgctggtgcacatgtggaccctgctgcaccactgtcccactgccaccagtgtgtgaacacgtgtggaccctgccatgctgctgccacttgtgtacacacaggcatgcacacaaatgctgccataccattgccctgttgctgctggaatgtacaagtgcacgccctgctgccattaccctgatgaagcccttttagcagcacccccatcaaagtgtttttgccagcagacccagaacgccttgctacctccagtgaagtggatgtttaacattgaagagccagagaacaaagccatgggcctggtcccaggccccagtgttggagtatacagcccaggagcactgagctgagcctcagccccctgaaattatccagttaaatagccagccaactgaacccaaatgtcaccacagtaaagtcctcaaggatatcaagaatataagagcaaaaagctccatcaaaagaatagcaaattcaaaaattaaagaaacatcactccacatagataagagaatcagtgctagaactctggcaactgaaagagcagacgtgtcttcctaccttcaaatccccaaactagctcctcattaatttagccagacagaaattactgaaatgtcagacatataatgcagaatctatatagcaatgaagatcactgagattcaggagaaagttgaaacccagtccaaggaatctaaggaaatcaacaaaatgatacaagagctgaaatacaagataaaaccactttaatgcaaaaccaaactgatctaatggagctgaaaaactcactacaagaattttataaaacattaacagcagaatagaccaagctgaggaaagaatttcagagcttcaagactggttcttcgaactgactcagtcaaacacaaatttaaaaaaagaactttgaaataaacaaaatctctgagaaataatacatttatgtaaagagactaaatctatcatgcattagtgtccctgaaatggagagaaagcaagcaacttggaaaacatatttgagaatattgttgatgaaaaatttctcagctttgctagcaaagtcaccattcatggtcagaaaatttagagaaccccttcaagatagacaagaaggccctcctcaagacacagagtcagcatattcttcagggtgaatacaaaataaaaaatactaaaggcaagtggagagaaagggcaggccacaaacaaagggaatcccatcagcttaacagcagacttttcagcagaaatcctataaaccagaagagattgagggcctatattctgtatccgtaataaaaaattccaaccaagaatttcatatccagccaaactaagcttcataagaaaaaaaaatctctaattcttttcagataagtaaatgctaaggcaatgatcaccagaccttccttaaaagagatcctgaggaaatgctaaacatggaaatgaatgactgttactagccaccagaaagcacatttacgtacatagaccaaggacactataaagcaactacaaaattaagtctacataaaaaccagctaacaatatggtgacaggattaaatgtacacatatcaataaattttgaatgtgaatggaaaaaatgggaataaatgcaccacttaaaagtcacggaatggcaagttggataaagaagcaagacaactgcgtgctctattgaaaatacccatcttacctgctatgacactcaaaggctcaaattataggaatatataaaaatttaccaactaaacaaaaaaagcagaatttgctattcttatttcagacaaaacagactttaatcaacattaatgagaaagaacaaagaaaggcattacacaatgataaagggttcaattcaagaagacttaactatcttaaatatgtatgcactcaacatcacagcacctagatacataaagcaagttcttagaaacctacaaagagacttagataccacataacaataccaaacaacttcaacaccccactgacagatcatcgaggcagaaaagtaaaaaaaagacactcaggagaataccccactaagatggccgaataggaactgctccagtctgcagcacccagcgtgagcgacacagaagatgggtgatttctgcatttccaactgaggtaccaggttcatctcactcgggcttgtcagacagtgggtgcagcccatggagcagggtggggcatcgcctctcccaggaagcacaagcggttgaggaattccctttcctagcaaagggaagccatgacagacagtacctggaaaattgggacactcccaccctaatactgcacttttccaacagccttagcaaacagcacaccaggagattatatcctgtgcctggctcagagggtcccacacccacagagcctcactcactgctagaacagcagtctcagattgaactgcaaggtggcagctaggcttggggaggggtgtctgccattgctgaggtttgagtaggtaaacaaagtggccaggaagcttgaactgggtggagcccactgcaactcaaggaggcctgcctgcctctgtggactccacctctgggggcacggtatagctgaacaaaaggcagcagaaacttctgcagacttaaacgtccctgtctgacagctttgaagagagtagtggttctcccagcacggagcttgagatctgagaatggacagattgcctcctcaagtgggtccctgacccccgagtagcctcactgggagacacctcccagtaggggccaactgacacctcatacagccgggtgcccctctgagatgaagcttccagaggaaggatcaggcagcaacaccttccgttctgcaatatttgctgttctgcagcctccgctggtgatatccaggcaaacagggtctggagtggacctccagcaaactccaacagacctgcagctgagggtcctgactgttagaaggaaaattaacaaacagaaaggacacccacaccaaaaccccatccgtatgttaccatcatcaaagaccaaaggtagacaaaaaccacaaagatggggagaaaccagagcagaaaagctgaaaattctaaaaatcagagtgcctcttctcctccaaaggaacgcagctcctcaccatcagtggaacaaagctggatggagaatgactttgatgagttgagaaaagaaagcttcaaatgatcagtaataacaaacttctctgagttaaaggaggatgtttgaacccatcacaaagaagctaaaaaccttgaaaaaagattagacaaatggctaactagaataaatagtgtagagaagtccttaaatgacctgatggagcttaaaaccatagcacaagaactacgtgatgcatgcacaagcttcaatagcagatttgataaagtggaagaaagggtatcagagattgaagatcaaatgaatgaaatgaagcgagaagagaagtttagagaaaaaagattaaaaagaaatgaacaaagcctccaagaaatatgggactatgtgaaaagaccaaatctacgtctgattggtgtacctgaaagtgacggggagaatggaaccaagttggaaaaccctcttcaggatattatccaggagaatttccccaacctagcaagtcaggccaacattgaaattcaggaaatacagagaacgccataaagatactcctcgagaagagcaactccaagacacataatggtcagattcaccaaagttgaaatgaaggaaaaaatgttaagggcagccagagagaaaggtcgggttacccacaaagggaagcccatcagactaacagtggatctcttggaagaaactctacaagccagaaggcagtgggggccaatattcaacattcttaaagaaaagaattttcaacccagaatttcatatccagccaaactaagcttcataagtgaaggagaaatagaatcctttacagacaaacaaatgcggacagatgttgtcaccactaggcctgccttacaagagctcctgaaggaagcactaaacatgcaaaggaacaaccagcaccagccactgcaaaaacatgctgaattgtaaagaccatcagtgctaggaagaaactgcatcaactaatgagcaaaataaccagctaacatcataatgacaggatcaaattcacacataacaatactaaacttaaatgtaaatgggctaaatgctccaattaaaagacacagattggcaaattggataaagagtcaagacctatcagtgtgctatattcaggagacccatttcatgtgcagagatgcacataggctcaaaataaaaggatggaggaagatctaccaagcaaatggaaaacaaaaaagaagcaggggttgcaatcctagtctctgataaaacagactttaaaccaacaaagatcaaaagagacaaaaaaaggccattacataaaggtaaagggatcaattcaacaagaagagctaactatcttaaatatgtatgcacccaatacaagagcacccagattcataaagcaagtccttagagacctacaaagagacttagactcccacacaataatcatgggagactttaacaccccactgtcaacattagacaaatcaatgagacagaaagttaacaaggatatccaggaattgaactcagctctgcatcaagtggacctaatagacatctacagaactctccaccccaaatcaacagaatatacattcttcttagcaccacaccgcacttactccaaaattgaccacatacttggaagtaaagctctcctcagcaaacgtaaaagagcagaaattataacaaactttctctcagaccacagtgcaatcaaactaaaactcatgattaagaaactcactcaaaaccactcaactacatggaaactgaacaacctgctcctgaatgactactgggtacataatgaaatgaaggcagaaacaaagatgttctttgaaaccaaagagaacaaagacacaacatatcagaatctctgggacacatttaaagcagtgtgtagaaggaaatttatagcactaaatgcccacaagagaaagcaggaaagatctaaaattgacaccctaacatcacaattaaaagaactagagaagcaagagcaaacacattcaaaagctaagagaaggcaagaaataactaagatcagagcagaactgaaggagatagagacacaaaaaaaacccttcaaaaaatcaatgaatccaggagctgatttttagaaaagatcaacaaaattgatagaccactagcaagagtaataaagaagaaaggagagaagaatcaaacagatgcaataaaaaaaatgataaaggggacatcaccaccgatcccacagaaatacaaactacgatcagggaatactataaacacctctacacaaataaaacagaaaatctagaagaaatagatgaattcctggacacatacaccctcccaagactaaaccagggagaaattgaatccctgaatagaccaataacagattctgaaattgaggcaacaattaatatcctaccaaccaaaaaaagtccaggacaagatagattcacacccaaattctaccagaggtacaaagaggagctggtaccattccctctgaaactatctgaatcaataggaaaagagggaatcctccctaattcattttatgaggccaacatctcctgataccaaagcctggcagagacacacacacaaaaagagaattttagaccaatatccttgatgaacatccacgcaaaaattcccaatataatactggcaaaccgaatccagcagcacatcaaaaacttatccaccacgatcaagtgggcttcacccctgggatgcaaggctggttcaacgtatgcaaatcaataaatgtaatccatcatataaacagaaccaaagacaaaaagcacatgattatctcaatagacacagaaaaggcattcaaaaaattcagcagcccttcatgctaaaaactctcaataaactaggtattgatgggacgtagctcaaaataataagagctatttatgacaaaatgatagccaatatcatactgaatgggcaaaaactggaagcattccctttgaaaactggcacaagacagggatgccctctctcaccactcctgttcaacacagtgttggaagttctggccagggcaatcaggcaagagaaagaaacaaagggtatttgattaggaaaacaggaagtcaaattgtccctgtttgcagatgacatgactgtatatttagaaaaccccatcatctcagcccaaaatatccttaagctgataagcaacttcagcaaagtctcagaatacaaaatcaatgtgcaaaaatcacaagcattcctatactccaataacagacaaacagagagccatagcatgagtgaactctcattcgcaattgcttcaaagagaataaaatacctaggaatccaacttacaagggatgtgaaggacctcttcaaggagaactacaaagcactgctcaacgaaataaaagaggacacaaacaaatggaagaacattccatgctcatggataggaagaatcaatatcgtgaaaatggccatactgcccaaggtaatttatagattcaacgccatccccatcaagctaccaatgactttcttcaaagaattggaaaaaagtactttaaagttcatatggaaccaaagctggaggcatcatgctacctgacttcaaactatactacaaggctacagtaaccaaaacagcatggtactggtaccaaaacagagatatagaccaatggaacagaatagagccctcggaaataataccacacatctacaaccatctggtgtttgacaaacctgacaaaaaacaagcaatgaggaaaggattccctatttaataaatggtgctgggaaaactggctagccatatgtagaaagctgaaactggatcacttccttacatcttatacaaatattaattcaagatggatgaaagacttaaacgtcagacctgaaaaccataaaaactctagaagaaaacctaggcaataccattcaggacataggcatgggcaaggacttcatgactaaaacaccaaaagcaatggcaacaaaagccaaaattgacaaatgggttctaattaaactaaagagcttctgcacagcagaagaaactaacatcaaagtgaacaggcaacctacagaatgggagaaaatttttacaatctacccatctgacaaaggtctaacatccagaatctacaaagaactttaacaaatttacaagaaaaaaatcaaacaaccccatcaaaaagtgggcaaaggatatgaagagacatttctcaaaagaagacatttattcagccaacagacacatgaaaaaatgctcatcatcactggccatcagagaaatgcgaatcaaaaccacagtgagataccatctcacaccagttagaatggcgatcattaaaaactcaggaaacaacaggtgctggagaggatgtggagaaatagcaacacttttacactgttggtgggactgtaaactagttcaaccattgtggaagacagtgtggcgattcctcaaggatctagaattagaaataccatttgacccagccatcccatcactgggcatatacccaaaggattataaatcatgctgccatgaagacacatacacacatgtttattgcagcactatccacgatagcaaagatttggaaccaacccaaatgtccatcaatgatagactggattaagaaaatgtgatacatatacaccatggaatcctatgcagccataaaaaatgatgagttcatgtcctttgtagggacatggatgaagctggaagccatcattctcagcaaactatcgcaaagacagaaaaccaaataccgcatattctcactcataggtgggaattgaacaatgagatcacatggacacaggaaggggaatatcacactctggggactgtggtggggtggggggaggggggagagatagcattgggagatatacctaatgctagatgacgacttagtgggtgcagcacaccagcatgtcacatgtatacatatgtaactaacctgcacaatgtgcacatgtaccctaaaacttaaagtataataaaaaaaaaaaatacattactcctttccgaaaaaaaaaaaaataataattctcaaataacttaaaatagcactaccattcaacccagcaatcccattttttggttatataccaaaataaataaatactattttccccagaagacacatgtttgtttttgttcattgcagcgatattcacaatagcaaagacatgcaatcaaacctaggtgcccatcaactgtagcctggataaggaaaatgtggcacatatacactatgaaatactatgcagtcataaaaaaagaatgaaatcatgtatttttcctaccaacatagatgcagctggaggccattaccctaaagtgaattaattcaggaacagaaaaatcaaatactgcatgttctcatgtataagtgtgagctaaacttttgagtacacataaacacaaaaaggaaaaccataaatgccagggcttacttgatggtgaagggtgaaagttagaatcagaaaactacttattgggtactatgctcactacctgtgtgataaaatcatttttacaccaaaccccagtgacacacaatttactcatgtaagaaatatgcacatgaacccctgaacttaaaagttggaaaaaaaccttggtcttctcttaaaattactgggtttcttttggagagactataataagagtttataaaaggctttttaaaactctctttacacaaacttcttggaaaaaaaaattctgtgtttaatcaaaataatttattgtgctctgtattttattaggtcttctgattagtaagaaaactgagtcttcctaatattaaaaaatttagagttttttgagaactatgtaacttttctgtatttgcctcttttttcataacgtgattccattaagtgttttaaatattttgtttgatatttttgacaaagttctcaaaagaaacttttaattaagtctttctgaccttgaattaacttacaataactacagagggtccctgagacatctgagatttgaaaaagagagatattaagctagtttgaattatttggtatgtaaaattatatgtgaagaaatgtcaaataagaaatgtttaattttttttcaatatgacattggaggcaatgttagcatgtgtctcccatgcagaaaggcaaaacatttgtaaatattcatgctgtgaacctttttccaagatgcagcacagaaatttatcagaaaaactgaaagaaagcatagactgtttgaatgaagtggtgggctgcagcttacactgtgagccaggcagaaaacatccaacaagagacaatgaacctattcatgaacccagcacatcactactacaaccagagtctcagaaagccatcacacaaaaattctctataaccaagaaattcatacagagtctttgccactgaaagcactcagagctggaactaggtaacaataatctgtaaacattaaaatcacattcttgaccatgtgtggtgactcacacttgcaatcccagcactttgggaggcagaggcaggtggataacttgaggtcaagagttcgagaccagcctggccaacatcatgaaacctcgtctctaccaaaagtacaaaaattagccgggtgtggtgacacgtgcttataatcccagctactcaggaggctgaggcaggagaatcacttgagcccaggaggcaaaggctcctgcactccaggctgggtgacacagtgagactttgtctcaaaaaaaaaaaatttacgttctgaagaaaaaaaaaaccagtataatcaaccacaaattcaaaagtaattacaagaaatagtctacaccaaagagaaagaaccaaaaaaccaattctagcaatatgaagaaaaaaaaaaaccccaggattttctaatcctctaaaaaggtcacactaactgtccagcagtggatccaaactaagatgaaatccttgaaataccagataaaaaattcaaaaagttcattaatttgttcaaggagatacaaaacaaaggtaaaaaccaacataaagaaattttaaaaattcaggatattaataaaaacttttctaaagagatagattattttaaaggaaactcaatcagaacttctgcaatcaaagacacttttagggaactacaaaattcagtagaaaattttaacaacagactagaccaaatataagagagtttaagagcttgaagacaaaacttttgtattaaccgaatcagaaaaaaaaaatcaaaaatgatcaaattcctcaatgaataggagattatgtaaaacagccaaacccaagaacaaaaggtatttctgggtgagaagaaaaaacaaaattttagaatacctatttgagagaattattggtaaaacttccttggtgttgctaaatatctagatatccaaatacaagaagctcaaaaaacttctgtaagattaattccaaccagtatatcaccaaggcctaagtttaatgtgaaggaaagaattctaagagcagtgagacaaaagcatcaggtaacttatgaattaaaacctatcaggttaacagcaaacttctcaacagaaaccttacaagccagaagtgattgggatgctaactttagccttctaaaaaaaaaaaaatgactgtcaaccaagaattttatatccagtcacactgttacataaatgaagggaaaaaagtatttctcagataagcaaatgatgaggaaatttgtcactactagacaagtcctacagaaaatgctaaaagaaaaaattcaatttagaaacaaaaggttgatacacactacaacagaaactcttaaaagcataaaactaacagggcttataaaacaataacacaatggagaaaacaaagtcacttgataacaacatgatgactggaaaattacctcacatctcaataccaacatagaatgtaaatggtctaagtgctctacttaaaaaatacagacaggtagaataaaatatattacaaaacaaatatctgccttcttcaggagacacacctaatacataaagattctttaaaattcaaagtaaaggggtaaaaaaagatatttcatgcaaatggaaaccaaaagcaaataggagtagatattcttataacagaaaaacagactttaaagaaacaacagtaaaaaagacaaagaagaacattatacaataatacaataatcaactatatgataacatatgataatcctaaatatatatgcattttactctggagctcccagattcataaaactattactactagactaataaaagagatagacagcaatacaataataatggggaattcaatattctactgacagcactagacagatcatcaaggcagaaagtcaataaagaaaccctggacttacactgtagtctagaacaaatgggcctaacagctatttagaaaacattctacccaagacgtacagaatatacactcttctcagcaacacatgaaacattctccaacatagaccatataatatcccacaaaacaagtatcaatatttttttaatattgaaattatatcaagttgcttcacagaccatagtggaataaataaaactaaaagtcagttacaaaaggtcccttaaacctatacatgtacatagaaattaaactgtctgctccggaataatttttggattaacaatacaatcaataaaattttaaaaatatttgaaatgaatgataacagggaaacaaggtatcaggacctctggaatacagcaaaaccagtgctaaaaggaaaattcacaatgccaaatacctacatcaaaaaggctgaaaagaatctggatggcaagaaagatcatcgagattcaggagaaagttgaaacccattccaaagaaactaaagagtccagtataacaattcaaaaaatgaaagatataatagccattttaatatagaaccaaactgagctaatagagctgaaaaactcactataagaattttacagcacaaacagaagtactttttatttaaattttaattgaagttcaggggtacataaacaggttttatataagcaaatgcatcatggcagtttgttgtacagattatttcatcacccaggtattaagcatagtatccattgttattttcctgatcctctccctcctacaaacctcctctctttgataggcagggggtgttgttcccctctatgtgtccatgtgttctcatcatttagctctcatttacaagtaagaacatgtagtatttgtttttctgtttctgcattagttttctaaagataatagcctccagctccatccttgctcctgcaaaggacatgatcttgtttgttttcataactgcatactattccctggtgtatatgtaccatattttctttatccagtctgttactgataaacatttaggttgattccatgtgtttggtattgggaataatgctgcatgcatgtatctatataatagtagaatgttttctattcctttgggtatagacccagtaatggaattgctgggtggaatggaaattctatttttaggtctttgaggaattgccacactgtcttccacaatgattgaactaatttacacttccaacaatgtatgtgttcttttttctccacacctctgccagcatctgttattttttgactttttaatactagccattccaactgatgtgagatggtatctcatggtggttttgctttgcatttccgtaatgctcagtgaagttcagctttttaaaatatgcttgttggatccacatttgtcttcttttgaaatgtgtctgttcgtgtttattgcccactttttatttttttattttttattattatactttaagttttagggtacatgtgcacaatgtgcaggtttgttacatacatatacatgtgccatgctggtgtgctgcacccattaactcgtcaattagcattaggtatatctcctaatgctatccctcccccctcccccaccccacaacagtacccagagtgagatgttcccttcctgtatccatgtgttctcattgttcaattcccacctacgagtgagaacatgcggtgtttggttttttgtccttgagatagcctactgagaatgatgatttccaatttcatccatgtccctacaaaggacatgaactcatcatttcttatggctgcatagtattccatggtgtatatgtgccacattttcttaatccagtctatcattgttggatatttggattggtttcaagtctttgctattgtggatagtgccacaataaatatacgtatgcatgtgtctttatagcagcatgatttatagtcctttgggtatatacccagtaatgggatgggtatatacccagaaatggtatttctagttctagatccctgaggaattgccacactgacttccacaatggttgaactagtttacagtcccaacaacagtgtaaaagtgttcctatttctccacatcctctccagcacctgttgtttcctgagtttttaatgattgccattctaactggtgtgagatggtatctcactgtggttttgattcgcatttctctgatggccagtgatgatgagcatttgttcatgtgttttttggctgcataaatgtcttcttttgagaagtgtctgttcatgtcctttgcccactttttgatggggttgtttttttttttcttgtgaatttgtttgtgttcattgtagattctggatattagccctttgtcagatgagtaggttgtgaaaattttctcccattttgtaggttgcctgttcactctgatggtagattcttttgctgtgcagaagctctttagtttaattagatcccatttgtcaattttgccttttgttgccattgcttttggtgttttagacatgaagtccttgcccatgcctatgtcctgaatggtaatgcctaggttttcttctagggtttgtatggttttaggtctaacgtttaagtctttaatccatcttgaattaattttcgtataaggtgtaaggaagggatccagtttcagctttccacatatggctagccagttttcccagcaccatttattaaatagggaatactttccccattgcttgtttttctcaggtttgtcacttacaagggacttgaaggacctcttcaaggagaactgcaaaccactgctcaatgaaataaaagaggatacaaatggaagaacattccatgctcatgggtacgaagaatcaatatcgtgaaaatggccatactgcccaaggtaatttatagattcaatgccatccccatcaagctaccaatgactttcttcacagaattggaaaaaactactttaaagttcatacggaaccaaaaaagagcctgcatcgccaagtcaatcctaagccaaaagtacaaagctggaggcaccacgctacctgacttcaaactattctacaaggctacagtaaccaaaacagcatggtcctggtatcaaaacagagatatagatcaatggaacagaacagagccctcagaaataacgccgcatatctacaactatctgatctttgacaaacctgagaaaaacaagtattgcccactttttaatatcgttggttgttgtcttctcataaatttaagtttcttatagatgctgaatactagacctttgtcagatgcatagtttgcggtatttttctcccattctgcaggttgtctgtttgctctgttgattgtttcttttgctatgaataaatgctttagtttagttagatcctatgtgtcaatttttgcttttgctgcaattgtttttggcatctttgtcataaaatctttgctcatgcctatgtcctgaatggtattgtctaggttgtctttcagggtttttatagttctgggttttacatttaagtctttaatccatcctgtgttaatttttgtatatggtgtaaagaaagggtccagtttcaatcttctgcatatggctagctggttatcccagaaccatttattaaacagagagtccttttccgattgcttgtttttgtcaggtttgtcaaagatcagatagttgtaggtgtgtggccttatttctgggttctctattctattccatagatctatctgtttttctaccagtaccatgctgttttggttactgtggccctgtagtatagtttgaagtcaggtagtgtgatgccttcagctttgttctttatgcttaggattgccttggctattcaggctctttcttgattccatatgaattttaaaatagtttttttcaattatgtgaagaatctcagttgtagttttatagaaataacattgaatctacaaattgctttggccagcatggccattttaacaatattgattcttcttatctcttgagcatggaatgtttttccacttgttcatgttatctttgatttcttggagcaatgttccatatttctccttgtagagatctttcacctctctggttagctgtattcctaggtattgtattttatttttttgtggcaattgtgaatgcgattgaatttctgattaggctcttggcttgactgttgtcagtgtataggaatgtcaataaattttgcacattgattttacattctgagactttgctgaaattttttaggataatggagcttttgggctgagattattgagtattttagatatagaatcatgtcatctgcaaacagtgatattttgacttcctctcttcttatttggatgccttttatttctttctcttgcctgattgccctggctgggacttccaatactatgttgaataggagtggtgagagagagcatccttgccatgtgccagtttacaagaggaatgcttgcatcttttgcccattcagtatgatgtttgctgtggtttcatcacagatggctcttattattttgaggtacgtttctttaatacctagtttattaagagtttttaacaagtagtgttgaattttaccaaaagccttttctgcttctattgagataatcatgtggcttttgtctttagttctgtttatgtgatgaatcatatttattgatatacaaatgttgaaccaaacttgcaacccaatggataaagcctatttgatcttagtggatgagcttttggatgtgctgctggattcagttcgccggtattttcttgaggacttttgcatcgatgttcatcaagatattaagctgaagttttatttttttgttgtgtccctgccaggttttggtatcaagatgatactggtctcatagaatgagttagggaggagtcccttctcctcaatttttttgaaatagtttcagcaggaattgtgccagctctttgaacatcttgtagaattcagctataaatctgtctgatcctgggatttgttttgttttttaggcaatttattactgactcaatttcagagctcattattggtttgctcaggtatgcaattacttcctggttcagtattgggagggtgtacatgtctaggtatttatccatttcttccagactttctagtttatatgcatagaggtgtttataatattctctgatgactgtctatattcctatggggtgactggtaatatctcccttgtttcagattgtatttctctgaatgtttttcttctttattagtctagctgtggtgtctgtttcatttttttcccaaaaagctagctggagaattcattgatcttttgaataaattttcatgtttcaatctccttcagttcaactctcattttggttatttcttgtcttctgctagctttaagattttttactcttgattctctagttctcttagttgtgatgtcacattgttatcttgagatttttctacctcaagttagaagtagaaacttctttctacttttgaggtgataatttagtgtcccagagattctggtatgttgtttctttgttctcattagtttcaaaaaacctcttgatagctgccttaatttcattatttacccaagagtcattcatgagcaggttattcaatttctatgtaattttatgattttgagtaaatttcttagtctttctttctaatttgatttcaccatggtctgagtgattgttatgatttcagttttttgcatttgcgaaagagtgttttacttctgattatgtgactgattttagagtatgtgccatgtggcaatgagaagaatgtatattctgttgtttttgggtggagagttctgtagatgcctatcaggaccatttgatccaatgctgagttcagagcctaaacatctttgttaatctttcatctcaatgatctaatattgacggtggagtatttgtctctcaatattattgtgtgggagtctaaatctctttaaaggtctctaagaacttgctttatgaatctgggtgctcctgtatttggtgcatatatattcagaatggttggaatttttgttgaactttttaccattacataattttttccatttgcttggtaaatttttctccatccttttattttgagcctatatgtgtcaatgcatgtgagatgagtcttttgaagacagcagcccaaggggtcttggttctttatccagcttgccactctgtgtcttttaattgggggcatttggcccatttacattcaaggttagtattgatatgtgtggatttgattctgtcatcatgatgttacctgaattttcaaacttgtttatctggttgctttatattgtgactggtctgggtccttcagtgtgtttttgtcaggagctctgggaagttatgtctggtggtaacaaatttcctcagcacttacttgtctgaaaagaattttatttcttctttgctcaggaagctttgtttagccagatataaaatattgggtggggatttgttttctttaaaaatgttgaatattggcccccaatctcttctggcttgtagaatttctgatgagagatctgccgttagtctgatggggttccctttgtcagtaacttaacatttctctctagctgcctttaacatgttttttccattttgaccttggagaatctgatgattaaatgtcttacggttacctttttgtgaagtatcttactggggttccctgcatttcctgaatttgaatcgtggtctctctagctaggttagggaagttgttatggatgatatctcgaaatacattttgcaagttggttccattctcccccatcactttcatggacaccaatgattcacagagtctgtctctacataattccatatttctcagaggttttgttcattttttttgccattcttttttctctgtttgtctgactgtcttatttatttcagcaagccagtcttcaagctctgagattctttcttccacttgctctattctgctttcagctccatcaggttggttatgttccttactatgctggctgttttgactgtcagttcctgtattgtttaatcatgatttttagcttccttggattaagtttcaatgtactcctgtagttcagtgatctttgttcctatctatgttctgaattctaattctgtcatttcagccatctcagctcacttcagaacctttgctggagagctgatgtgttcatttggaggaaaggaggcactgtggctttttgagttttcagggttcctgcactgatcctttcattttcgtgggcttattaccttcaatctgtgagacttctgacctatggatgagtttttttcttttatcctaattgataaccttgagggtttgattgtggtataaggtggattcagctgactggcttcatttctggaagatttatggtggccaacactcaactcccagctcctggactgcatgctctaaatctgggtgacttgtattctgtcccaactttgttctcttgctctttgaagtcaggaacccactgtgctgggggccaggggaagggaatatgctcctagtccactggtcactacactctgataggctgtgtcagccaaagtgttttgaagtgcagggacagtgggatccatcctccttcacacatgccgacagcaatggtagtggtagctgtggcagagtgataccaggtactaaggtatctgcctcccttcaaacctcaggtcctcgccaaagcttcttatacccttagttgactgccaggttgttgcaagtgcctaataacaggcacaatttcagaaagacccacaagatgtgaaattggctcaaactactgtggtaagtgtatcagaagtattaacagcagaataaaccaagctgaagatacaatttcagagcttgaagactggtctttgaatgaactcagacaaaaataatgaaaaaaggattttaaaaaatgaaaaaatttagaaatataggattatgtagagagatcaaatctatgacacattggcattcctgaaaagagagagagagcaatcaatttggaaaacatatataagaatattgtccatgaacatttctctaactttcctagttgagacttagcttcacatttcaccaaatggacctaacggacatctccacgatactccacataacaaaaacaaacattcaaattcaagaaattcagagaacatctgtgagatactctaatgactaagaaacatagtcattagagcctccaaggtcaacatgaaacaatattaatggcagctagagagaagtagcaggtcacctacaaaggaacccaatcaggctaacagcaaatctttcagcagaattctaagccagaaaagactgggggcctatattcaaaattcttaaagaaaataaagtccaacaaagaatttcatatctggccaagctaagctttatatataagtgaataagaaatgaaattcttttaagacaagcaaatgctaagggaatttgttaccaccaggtctgccttacaaaagatccttaagagagagtgaaacatggaaataaatgttcttttccaatcaccacaaaacacactcaagtacctagaccatggacactataaagcaatatttaatcaagtctacttaacaaccagctaacagcataattacagggtcaaatctgcacatgtcaatattaaccttgaatgtaaatgaattaaactccccatttaaaaggcaaagagtgacaggttgtgcaaagaagaagactcaactgtatgctgtcttcaagagacccttctcacatgcaagaacacccacaggctcaaaataaatggatggagacagaccaatcaagcaaacagaagaccaaaaagagcagggtttgctatttttactgcagacaaaattaactttaagccaataacaatcaaaaaagataaataagggcattacataataataatgtgttcaattcaactagaagatttaactattctacatctctatctatctatctatctatctatctatctatgtatctatctacacatctaacactggagcacccatatttataaaatagctcttacagacatacaaagagactcagataacatcacaaaagaagtgggagacttcaacaccccagtgacttttggacacataatcaagacagaatactaacaaagatatttgagacttgacatttcaccaaatggacataacagacatcgccataacactccacataacaaaaacaaaatattccctcttctcacattcacatggcacatgctataaaattgaccccatgcttggccaaaagcagttcttaacaaattaaaaagaaaaaatcataccaaccatactcttggaccacagcaaaacaagaatagaaaccaataccaattagatctctcaaaaccatacaattaaatggaaattaaacaatctgttcctgaatgacttttaagtaaacaaagaaattaaggcaaaaattaagaaattctgggaaactaataaaagcaaagaaacaatgtaccagaatctgtgagacataactaaagtaatgttaagaggaaagtttgtactgcaaaacacccacatcagaaacatctcaaattaataacatattataatatcacacccagagaaacttgaaaaaacaagagaaaatcaacctaaaattcacataagaaaagaaataggtcaggggtggtggctcaagcctgtaatcccagcactttgggaggccgaggtgggcagatcacctgaggtcgggagttccggaccagcctaatcaacatggagaaaccccgtttctactaaaagtacaaaactggccaggtgtggtggtgcatgcctgtaaccccagccactccggaggctggggcaggagaatcacttgaacctgggaggcagaggttgcggtgagctgagatggcaccaatgcactccagcctgggcaacaagagtgaaactccatctcaaaaaacaaaaacaaaccaacaaaaaagaaataacaaaagtcagagctgaaataaatgaaatggagatgaggaaaactatacaaaaaatcaatgaaacaaaaattgttttttctaagaataaagaagactgatagacttctagctagactaataaagggatcaagggagaaaatccaaaaacctacaatcagaaatgaacatggagacattactactgaccttacagaaatacaaaaaaaaaaaaaaaaaaaaaaaccctcagagactattatgaacaattctatgcacaaaaactagaaaatctagaagaaattgataaattcctgcaaaaatgccacttcccaagattgaactaagaagaaattgtaaccctgaacagaccaataatcagtttcaaaattgcaccagtagccaggcacagtggctcattctttaatctctgaactttgaagactgaggcaggtggatcacttgaggctaggagtttgagaccagcctggccagtatagcaaaaccctgtctctacagaaaatacaaaaattagccaggcatggtggcacatgcctgtgatcccagcaacttggtaagctgtggcacaagaatcacttgagcctgggacacagaagttgcagtgagccaagatcatgccactgcactccagcctgggcaacaaagtgatactctgtttcaaaaaacaataataattgaaataaataaaaatgataaaaaaatttgcaccagcaatataaaatctatcaaccataaaaagcccttgaacacacagatctacagtcaaattctaccatatatgtatagaagagctgggatgaatcctaccgaaactatttcaaaaaattctgaactcattctatgaggctaaaatcattctgataccaaacttctgcagagacacaatgcaaaaagcaaacttcaggccatgactccgaatatctggaacagctcagaaatctgggtgcagaaagctagggacaagcctagccagtcaagttgcctccagggcagatgccagaggcagattcactgggctgggagagtgcaagctgaatagaccccacaaccatctgctgagctgaaaaccctgggccatgggtgccttcccagttgcatatcattgggtatctctgccctgccagaaactcctccactccttgacccactgcaccagtagacataccctacaacccactcggactctctcaagcacagggaactggcaagcccctggggagttgtgaatctactggtgacccaacacttagctggtaccacccctaaggaaggagagagtgcatcctaccaaatctcccattggggcaaagaaaacacaggcatggcaccagtttttgaaggggatggcaccaagtcctgcgaatgaaattggagagggagtcatctcttgcccctgccttctttccctgctgcataagcactgaaaaagttgtgaacagcagagttaagagcttatctgctggcccttactctagtggactacatcctaagttataccaccaaacacaagtacattcctccaataggcaatgcctctgaaacccaccagagtaacgtatatacaacctaggaacccataagtacagagccttggccttctgaaagcactcagaaatgaagccaattgactatacactatattcaccagtcaaactctcaagtggagcaagaataaaaaaacaaaaaagtcccatccaaatgacagcaaactaaaaaaaaaagacagctctctcagatgagaaaaaattagcacaagaactctggcaatcaaaaatgtcagaatgttttgttacctccagaagatcacactgattccctagtaattaatcccagccagattgaaatgtctgaaattaaagacacataattcagaatgtgggtgtcaagaaagctcaaagagatttaagagaaagttgaaaccaatgcagggaagccagaaaaaaagatccaagatttgaaagacaacataagcatattaagaaagtaccaaattgaacttctggaattaaaaaattcactacaggagtgtcaaactacagtcggaatcttgaacaacagactagaccaagcagagaaaagaatttcagagctctaagacaggtccttcaaatcaacccagtcagacaaaagtaaagaaaaaagattaaaaattgaacaagaaaatccaagaaatatgggattatgtaaaatgaccgaacctactactcatgggcatttcggagagaaaagaagaaagtgtaagcaactggaaaacttatttgaagatgtaactcataaaaatattcccaatctcactagagaggtcaacatgcaaacacaaaaaattgagaaaacccctatgagatactatacaagatgatcatccccaaggcatatagttgtcagatgttctgaggtcaacacaaaagaaaacattttaaaggtagccagagagaagggtcatatcacctatgaaaggaaaccccatcaggttaacagtggacttctcagtagaaatgttgcaagccacaggattctattctattctattctattctattctattctattctattctactctattctattctaattttgagacagaatcttgctctgttgcccaggctggagggcagcggcacaatctcggctcactgcagcctcctcctcctcagttcaagtgattctccagcctcagccgcccgagtagctaggactacaggcacccgccaacacgcccagctaatttttgtttgtttagtagagatggggtttcaccatattagccaggctggtctcaaactcctgacttcaggtgatcaacccaccttggcctctcaaagtgctgggattacaggtgtaagccaccgtgcccagccaaaatttcatccctattattagcattcttaaagaaaacacattccaattaagaatttcacatttcactaatctaagcttcataagcaaaggagaaataaaatctttttcagacaagcaattgctaagggaatttgttaccactaggctggccttacaaaagatgcttaagaacattctaaacttggaaacaaaagaaagatacctgttactacaaaatacatgtaaataaatagcacacagaccctataaagcaaccacacaatcaagaccacaaagcaaacagccaataacaccatgacaggaaagaaaactcacatatcaatattaaccttgaatataatgatctaaatgcccccacttaaaaggcacagagtaccaagtttgattttaaaaaatccaaccttctaatgttttcaaaagatccatctcagatttaactacacacataaactgaaagtaaaaggatggaaagaaaactattatgcaaatggagaacaaaaaacaccagggcttacaattcttttatcagataaaagagactccaacaacagcaaaggagaaagcaggtcattagataattataaagggtttaattcaatcataagccttaactatcctaaatatatatgcactcaacattgaataacccagattcataaaacgaatacttctagaccaacgaaaagacccagagagccacacagtaatagtgagggatgtcagtatttcactgacagtgctatacagatcactacggcaaaaaaaacaaaaaccaaaaaacaaaacaaaacaaaaaaacctaacaaattctggacttaaatttgacactagacctagaccaatcagatataatagacatctacagaatacgtcatccaagaaccccacattatgtatttatctcattcacacatggaacatactccaagattgaccacatgcttggcaataagtcaagtctaaatgaattttttaaaaaatcaaaattatatcaagcatactattggaccccagtatattaaaagtagcaatcaataccaaaagaaactctcaaaatcacaaaattacatgaaatctaaacaacttgatcattattgaattttgggcaaacaatgaaattaaagcagaaatgaagacttttttgaagctaattagacacagcaaacctaaatctctgggaggcagctaaagcagtgttaagaggaaaatttatagtgctaaatccctttatgaaaaagttagaagatccccaataaacgacctaacagtgcaactgaaggaactagagaaaaaaaaatccaacccaaaagctagtagaagaaaagaaataactaaaataagaggagaatgaaatgagactgagatgcaaaaggccatacaaaagatcaatgaaaccaggagcttgcttttgaaaggaatagattggtacaccattagctagattaatcaagaaaaaaaaagaatcaaaataagcacaatcagaaataaaaaaggtgatattaaaactgatcccgcagaaatctgaaagatcctcagagactccaaaccaaatccagtagcaaattcaaaagttaattcaccataatcaagtaggctttattcctgggatacagggctggctcaacatatgcaaatcaataaataaaattcaccacataaacaggatgaaaactaaaaacatgattgtctcaatagattcagcaaaaacgtttgatggatttcagcttccttcatgatagaaaccctcaacaaagtaggcatcgaaggaatataactcaaaagaatcagaaccctctgtgacaaacctacagctaacattggaatgatgggtaaagctcaaaccattccccttgataactggaagaagacaagaattcagactctcccaactcctattaaacatagtactggaagtcttagctagagcaaacagcaagagaaataaataaaaggtgtccaaattggaagagaggaagtcaaattattccatttgctgatggctttctatcctgggttctctattctgttccactggtctttggtgtgatttattttggagaatatttcatgtgcagatgagaataatgtatatcctgccattgtgtaaaatgttctgaaaatgcctgttgggttgatttggtctgaagtctaatttaactgcaatgtttctgtgctgattttctgcctcagcattgtcaacagtgttaataccccattattattgctgtctatctgttctcttaggtctatcagtatttgttttatgaatatgggtgctccagcattgggtgcatatacatttagatagttatgtcttcttgttgaattgagccctttgttattatgtaataatcttctttttttaatgctgttgatttagtctgttttatttcatataagtttggctatttcagctcattttggttttccatttgtgtggtatatcttttcccactggttttctttgaggcttggctttttaccattaaagcgtgtctcttgtaggcagcaaatgtttggatcttacttttcttatttaatttgccagtctatatcttgtaagtggaatatttaggccaattacactcaggggtaatattgaaatgcaatgtttttattgctgtcataatgtttttacctggttgttttgtagcaacaattgtataattgctttatagactctgtgatctttttacttatgtgtgcttttatgatggcaaattttgtccttttatttctgtctttagaactcttttgagcatttcttgtaagtccagtcaagaggtgacaaattcccttagcatttgcttgtctgagaaatactttatttctccttcatttatgaagcttaatttagccaaagccaaaggttttggttggcagttctttgctttaagaagacagaaaatcgaagcctgatctcttctgggttgtacagtttttgccaagaagtccactgtcattctgatgagacagtctttataggtgctttgatacttctctctagctgatttcagcatttgttcctttatgttaactttggtttgtctgatgaatatatgccctggtgagatccatcttgcagaaaatctttcaggtgttatttgcacttcttatatctgaatgtctaattctgtatctagatcagaaaagtttcttgagttaactaatcagatacatttcccatgctttttactgtttcttcttctcactcagaaatgcccatagcttgtaggtttgattactttacataatcccacatttcttgagggctttttaaattttttatattctttttttcctaattttcttatgactgggttaattcaaaggactgggctttcaggtctgaaattctcccttctgcttgtctggtttattgttaaaatcttcaactacattttataattccttcaatgaatttttcacttccagaagttctgtttcttttttaaatatctctttagtaaattttgtattaatatccttaattgttattctgatttctttatgttggttttcaactttctcttggatctcattgagcttccttacaataaaaaaaatttgaatttttttttatgtgtcactttagttttatttgttagaatccattgcttcagaactgctgtgatcctttgtgggtgtcaaaacactctgtctttctgtactgctgaagttctcacattatttctcatttatagaagctgtcacttagttattttctatttgctttcatttgaagaacattttcaattttcaattcttttctcttttgggggtgtgattatatgttgtgtgtaatcatttggcttcaattctgggtgccttcagggggctaaggctctagatgagtttcttggttatagatagtttttgtgcagtggctttctcaaatgctgattgttgtaccaatatattgggcatataatttgactcactatcttttgcagggctgggagtgcagaagcctcaggaagattatctcattccctagtatcatgcccttctgccaacaggttttgtatatggttatgcagttcagtttacggtttagtagttggcacttactagcagacactggcttgttgttttgacaatttgatgactagcaaaagcccctcccctgaagggggtggtgggaaagctcactgtgggatgcacacaggtctctgccaagtggtagaggtgtgaagggtgttgcactagctcctcatcctagggatgtaacttacatccctatctactcctgttcaagggctcacaacctgcagttcagatagacaatgtcctttatctccacgctgcaatgcaactaggtttcgtagaaaacattcatcctgtggctacagctgaaagggcctctggaaaaaacctcttcccacagcttgaaatagacagctgtagctggtctatactctgtagctggttcattctatggtgcagaaatgctgctgctttgtatggggaggaagagataagtcccaccctttgagcaagtccaggttggtggggacactttcaactggggtgcagctgccctaagtgtactgaaaagcctgtttccaagtgcatccacacaaacccccagcagaaaacgtcatgattgtgtctgcagcagtgatggagacagcaaaagatgccttttccatttcagttcccagccaatggtaccacctgtcctttgggacaagacaatactcctaattttcaaagatcagcattgcacctgtgtctctgctaggagaaatacagccattttctggttataagtggggaggggggctctccatcagggaagaatgtgcattccagtttcctttgtcccaaaatgtgctctggtggactacaatcccccttccctagtgaaggcctgtatcaaaggctaggtctctaaggatcttgcagctccccaaggtcctgctggttctctgtggttgccgtaggcagaagaggttctgggaaatgtttgtgtgggatatagtcatgcagagagacacaagggctaaaattatctggaccgaatagaggccccaaacagatgtacagtctgtatggtgctcaccacctcagctcgggtttgagggggagagcaagcaaacctatgtgaactcaccacccagtgctctgccctccagatgttccccaatcactgccaacagtggtgcctgcgtttgcaagggcagaggggctctcagacaaattggtggcaatgagttgggtacaagagtgaggataaaaagacacactcccatctacactttccatgggactccaagttcctcatgggtcagtctctgccagacatttatgccctttttttttcctgtacccccaacttcttcctgtgggttctccaaaggtttccgacacttttccctcagcagtccacttgggccatgattattcacctgtaaggttaaatcttctttctaaggagaactggtatctgatgtctctagtaagccatcttgaaaaaaatcacgattttcattctttattctgttaatgtgatttatcacaattatttttatttagctttattgaggcaaagaaataagacaaataaaattgcgtatatttaaaatgtacaacatgatgatttgaagtaaatatatattgtgaactgactgctgcagtcaagttaattatcatattcactacttcaaggacttaatttttttctttcattttgatgagaatgcttaaggtctactcttagaaaatttcaaagtatataatttagtattattaactgtagtcaccatgctttacattatattctcagaacttacttatcttagaatggtaagtttgtatactttggcctacatctcccaatttgacccgcccctagaccttatcaactaccattctactttatttctaagaactcaattttattgttttatattccacagtcacttcttttgctttaaaatgaattatgtaaattacagcacagagaaaagaggcagaaagaaggctaaagggttttacactacttaatcttgggattggggtaaaaattatgacctgtgggtcaaatgcagtcctttacctgtttatgtaaataaagctttatcggaacacagctatactcattcatttacataatatctgtatctgttttcacacttcaacagcagaactgagtaagaagaaagactgtatagctcatataacctaaaatatttattatctgccctttgcagaaaagctttctgactagttgtaaattaaaaagagcatcttcatcataatctgaatgagctgaagtaacacaaaatcatcttcaccaatgttcttgagccagagtaagtggattgatatatttccatatcatatgtggtttgtattagtcaatattgtgttgctataaaggaatacttcggactgggtaatttattttatttttattgatttattgtttttccaagacagggtctcactatcaccactggtatacagtggcacaattttggctcacgtaactgccaccttccaggttcaagcgattctcccacctcagtctcccatttgctggaactacaggagcacgccaccatgtctggttaatttttgtatttttagtagaggcgggatttcacaatattggccaggctcaaactcctgacctcaagtgatctgcctgcctaggcctcccaaagtgctgggattacaggcatgagccaccaggctcagcccctatttttaaaataggttaatttacctcacagttctgcaggctatacaagcatagtgccactatctgctttaggccaggacctcaggaagctcccactcatggcagatggcaaaagggaacaggtttgtcacacggtaagagagggagccagagagatgccatgctcctttaagccaccagctctcatgtgaactaacagagcagggacttgctcattaccatagggaaggcagcaccgagccattcatgagggatccataccatcactcaaacaccttccaccaggcctcacccctctgacactggggatcacatttcaacatgagatctggaggagagaaatatcccaaccatatcaggttactcaaacattctgcttagaatttgtgcggccaaaactagttaccaactgtgtttgttaaataaaaaatggtattaaaaatttttgtgtataactaaaaaattatacagataggtatagagaaagagaaagggaagagggagagggagagggagagagagagagagagagagagagagagagagagagagagaggagctatccaatttgagtgtaaggaaatctaaaaaaaaataagaacttaaaatcctattactagaaactgctttttgaaacctagaaatattttattatatttttctttatatttaacagcatgggactgttagtaggacccctaccaaagacaatttacaacttcaagttttacccaccaatgatgtgacaaaagctttttgaatttaaactaagcagcacttctattaaacattgattttaataatataattgaagtgatatagcaaactaaaaatgtttttatttctaaagtaaatattttagtcaaagttgcatcaaaaatcaagcacttctgtgacatttttcaagactttaaccacaattatagttagtactacatagtacacattatttaaaatgtattataaaccttttctctttatatgaaatataaaatttaaaatgctgtaacatgattcatattgaaaaacatgtaaaattgtatacactgctctcatacagaaagtgccactggaatcacataaaactttctaatgctttaaggtgccaggcacagtgcttggcacatattacatacttcataaatgtttgttcactcattctctcatttactcatgtactcaaagaaatacgggcttaaggagaaactgcattataatgagaactgaaagcacaatcttttatcaacaaacttggagttttgacaaagactttgacagagagtggagcagatgagaggatgataatcaagatttcaaactccttggttaaaatctactaagtaaagccctgggttcacaagatgacatcatagagaatcagagtcaatactccacaaaaagaatgcattctttcaatacccaggttggacttttatatataaccatctgcttgaagctgggaataagtcgtgttagaagtaaaacacacagtccaccggcaggtaagaaccacctgatgggggacttgtttttctgcgctgagacttcttttcaggtagggtctcattctcttggttttgacaacttaatacaagttgaattaaaaaaaaaaactggcttaacccaaaaagttttattttaaaataaagataaataaatgtagaaggtagaggggtgtttaacattcctatttttttcctgttatgcacgaaccaatccatctattctgcatatttgtgccaaagtcacaatgtgaggtgtcaactttttgaggagcatttctgggctatttgcggaaggtctgataaatgcagtattttaccagagtaataaggtctacaaaatgcaaaaagctgtaaaaaagagaagaaagtatgggtactaagcagaatataagataaaaattgatcttggaggaaatttacctattttctgtttgccccaagaataccgtgctggcagcaagatgcactttattttttcctaaatgggaaacgggttaaaaatctgtaacaaaaataaaacataacactggcaagtcacttgcagctggcctgaattgtctttggtattcagagaagggaaaaaaaaaaaaaaaatggagggccgggcgcagtgtctcatgcccgtaatcccagcattctgggaggccgaggtaggcggatcacaaagtcaggagttcacgaccagcctgaccaacatggtgaaacactgtgtatactaaaaatacaaatattagccaggcatggcggcacacacctgtaatcccaggtactcaggaggctgaagcaggagaactgcttgaacccgggaggcggaggttgcagtgagccgagattgcgccactgcactccagcctgggtgacagagcgaaactctgtctcaaaaaaaaaaaaaaaaaaagtactgttgtaggtccagtcttgtcattccacagaaggtagggagcgtagggagaggtgtagaaaaccctctcaaattcttcgcttatgaactgactctgcttgaatacttctctaccttctcttaactccagtcatctgagtaatacaaagagagccgttggagatacaggttgtatctcctcatctcttgagaatttcctgggaaaccaagaaggcctctttactctgcattcttataaacaaattaagagtttggagacttcattgccatctgcacagcttctctgggtctttgccaattaaactttcttgccttttttttttttagtgattcctaagtgggcttgtgctatttttagcaaggcttttttgagaaccaagtactttcccttttctcttctaaagttatggtcatctacctttatcatttaaacaatttaaaggtttaagtagtaaaaaaattacaatctcaaaatatgtcctaaaatttgactctcttaaagactttattgtaactggctctacatccttattttctatgtttactaaaaacttttgtagtggttgtcatttatgcatcattggctgggctgtgagaactgtttaataatttgtggtctgagatgatcaaccttggaaaatatttaattgtattcattcattaaatcttttcccaacttaaatctaaaagctaagttgaaaagaaatgttatcaaatacggaaataagccttcagaattccaagttggatttcttgtatgaacttttttgtctcattaaactttgtttaatgagacaaaatctttaaattcagagtaaatatcatactagttatactgtttccaattttattaatgtcaatggacgatgtctaaattaaacaataaaaagtcccttcagtttatgtgacagaaaatgcgtgagcattagatatttatcttacaccatagttactgataattttttttgccaaaatataaagaattagtaatttctttaaaaagaaataacaatgcaaaacctactgatggtaagagaaaatccctgagatacttacttcaacacttttatcactgaaaacgattttgaagctattctaattattttgatttctataaagatcaatagaaaaaattttaaaaacataaaatatttgtgaatggcacactcacctgataagataataaaggatatcatcccagatagaatatttaagaaagttgcactgtgttttgtttttgctttaatgagttgtaaaagtaatttagcttatcaagacaaattcagagctacataatagtatcgtgaattttgccaagtcacataaataaagttgtgagttggatgactctcctaacgttattatgagatttaagtggataaaacttgctcggtagatttattagttcagaaaaataatctcctaccagcaaaaccaagaatttcttttagaacaggtttcaaggcaacaaactgtggcatttttccgcactttttgtcatgctaccaccactgactgaaccacctgaattaagtctcaaactcaggcttataggtagtggttatgacaaatagcagttttaatgatttcatatgaagacaaagacttaaagagtattttttgtgagatcatgcccctagaagaaactaaacttaaccatgaaatttaaatgaaatagattttatttaaaccgattaaacaggatttgaaatggttgccagtctggtcatccaatagggaacttgaaaattcagacatggattggcacttctgtttgttttttgagtcttcttgtcactgatgcagttatactatattttttctttatcttagttcattacattactaaaatggagaaaaatgagacaatgtggaatatttgacagttgctccactgtaggaatatataataggttccaaaggccattcttaactcctgcaatgtgctctatattcttggctttctcttaggaagtctagcctccagacttcagagctctacaaaccatatatatgtgtgtgtgtgtgtgtgtgtgtgtgtgtgtgtgtgtgtgtgtgtgtgtgtgtgtataaatatatgtaactctctctaaatataaaactctctatataactctctatatacatagagttatatagagttttatatagttatatatatatatatatacatatatttaaaatatatatggtttgtagagtacttggtggtgtaaaagtaattgcgatctttgctgtaacacacatcattcttatatgaccactatcatgttgacttagaggtctaggttttcagactacattctatagtggtccacgtaaaacaaaacaggtgagactggtcctggtcctcggaactgcttttatccaacagcagaattacctgaaagtgtggtgttggctaaatgtaacacaggcagagggtgagcctctgtattaaacacctagtagtctaaaggtaaaaggtcaccactggagaacagcacatacaaatattttaagtgtttcagcaagaaagacaccctgctctacatcaccatgtgtaggagtagagaaatgtacatctttgactccagaaaatccaccactgactcagcaatacttttcaatggccagtgctgttccctgccccactgcctgtattttggattgtgagagaatcaccgtaggtaccaacggtttcaattacttctggacacaggatataatacttttcagcctgacagccacaacctccactgcaccatcaaacttgactgactcaggacctagctttaatgcagtctgtcatatgactcatgacatgtatatgcaatttccaccccagctctaaataatgacagacttatctgttctggaaccatcttctcctagtgcaaacattaccccagcaaagcaggccagatgccccatcttgttttccaagtgcccactgatccattctttactaaagattaagacatccatgggagttcttgtttttttgcagcctcaagagcatcaccacacatctttctccattcatggtctgttttatctgacatcaaacgtgctctcagtaagtagtcataaaaactgtctcccgatcaccaaatgatgtgtgataccgaccccagcaccctgttcttgggtttaatttggataaagaccgtttggacaatccattttctgaagcagtttccgcatgtacatgaccttgttgtagtaaaccaggtcttctgtcaagtagctgaggtggatgaactccatgtgcagtgtaccagattcagccagaatgctgctacatgcaggcccctagcttcagctgcaccctactccactctgcaaatgtaccattgtccagggaatcccagtacatgtgtgaaaggcaggaaggaatttcttagccagttgcacagctttaatcttgaatatctcctttcctgaaaggtgatatgctgcaagtaggccttcaataaactgaatgttgacgtcaaacacaaacatctctgaattcacactgacctcaaggttgtctttaaacaatctttgcacatctaggaattcagcatgaagtcccaagatataaagggtatccaaagcatctacaacggtagcacccatttgtgaattttcaaatgttagtggcacatcctttccttttaataggtctgagttcattatgcccccaactgtatgtcctataattatcctaggcatgtttcatgctttaatttttttcccttttcttttttatgttgtcttccaggtctccaccattcatgcctacaaagtttggaataaggactggtggcagtggcttgttctctgtcttcatttcttggaccctatttttctctatctgaatttctgcttggatttccttgcttgacttttcttttctttcctttttttgagatgtggtctcactctgtcaccctggctgagtgttgcagtgccatcagggctcactgcagcctccacctcccaggctcaagcaatcctcccaccttagaccccagaatagctgggattacaaaagggcactaccaggcctggctggttgttgattttttgtggagacaaggtctcatcatgttgcccaggctggtctcaaactcctagatgaaagccatcctcctgacttggcctcccaaagtgttgggattacaggtgtgagccacagcacccaggctgcttgactttctcaatttttcttttgtctcttccagggacttgtcatgattagctcgaactttatttctcagaggttcttcttcttcttctctgtgtgtatgttaattgggtgcatagatcaggaagacttcagggtttttagcccctttgccagctactacatgaggaattaacacatcgtctaaacccagatcaaagcgtttgtgttttgagaagcctagaagaaaaaagaatgcccccaaacacagggtgatgaaggcattaaaaataagtgtcttctcagaaagtctcaaggtagtgctgtgatgtggggagggcggccccaggttcagaggtgggatcccacgtctggagagggcagcagggctggggtagtcatcgtttatgctcttgaagcttacagcaaatgcacgatacattgaactgtcttcaaaatcttggcaaaaatgggaaaactcaattttgctccacttgaaggactgctgcgcttcttcacaggcacctctttgacgctcctccaattccattcagaaacgtgagtgaccccccccccacccccttaaacgatcacaagcttatgtcctgcgagatctcgtttgccctttgactttcagggccctatcgggttatcagaagactcttcattcctaggggtagatcagagaagtcacactgcaaaggagctgccccttggggaggtgctcaagggtggtcttctgccccaaaagggagtctggctaactctgagaattgcagaaggttcaccatctctggtccttccattccagaatctcttaaccttagtggtggaaaaaataagggtctccaccgaaatctcaaaacagggaggaaggtttccggcctcccggaggccaaggcagaggcgctgggggaaggagcaagaagggaccagccgcccgcgcttcccgacgctgccaggcaggctcccgggacgggcagagctccgaggctgcctccgggcagtcacgtccaacgtacctgagcccggccagccgctgtcgctgtcgccgccgcactcgcctgtccggacgcaccttcctcctcctccgcggcccccgagaagctgggcgcgcaggcaagggaggcgcggcggcccctgcggctggtcagttcaccaggtgcctgctcccgagcgagttgccaccgaccccgccgcgcccggccgagccccgcgctccgcagcgtgggaaggagccgagcagagacccttgctccgagagcccggggtcggcgcctgctcattcctcgcgcagccgtggggcagcgggtggccccgggcgcgcgcgagcagcctcttctctggcacgcagaggccggctccgtgtcctcggccagccgccgtgggggcctcctccgcgctgcctcgcgtggtgcccggctcggcctagatgcggctgctgagagatggcgcccacgcgcggggctgcggcccagcctctgcctccccagtactggtgggcgccgaacagctgcggggcgacacgcgctgggcgcacgcacgtaggagccggagggtggggcagatggggcgcttccggaaccctccccgactcgcgagtgggcggcgccggcggcggagcgtggggcgcgctccctggagtccacagttaagtgacacaatcctgggtttacctttctctgtcgggatcatttttcttagcatgacgacctccaggtcagacacaaggtcacaggtggcggtttctgccttcctctggctgaatatatttcattaaatatatattccgcattttctgtatccagtcatccctctgtggactgataggttgtttctgtgtcttggctagtttaaataatggcgtaataaacataaagtgcagattatctctttaagataccgatttcctttccttcagacacatactcagaagtgagttgtatttttaactttttgaggaacctctgtatgttagttcatatgtctgcaccagtttacattcccaccaacagtgtacaaggacttccctttctctacatgctctgcaacagttgttctctcttgtgaggtgttggtgactatttttagtaatagccattgtaacagaagtgagatggtatctcattgtggttttgatttgaatttccctgatagtgatgtcaagcatctttgtgtatttatacctgttactgattttttaattttcttgaaaaaaatgcctattcggaagatatacctgtttttatttgggtgttttttgtttgtttgtttgtttgctattaggttgagtaccatatatattttgaatactaacctctcattagattatggtttgtaaatatttctcctattctgtgggttaccttttcatcttgttgattgcgtcctttgctgtgcagaagctttttagtttgatatcataccatttgtctattttttatttttttgcccgtgctttgtggtatatacaaaaaatctttgccaagacaaatgtcaaggagcctttccctgttttcttctaggagttttacagtttcagatcctacacttaaacctttaatccatttcaaattgatttttgtatatggcgtaaaataaacagtctaatttctttttcttcctcctaccttccttttttttccttttatttcttcttctctttttttattcttgcatgtgaatatccagttttccaaacatcgtttattgaagagactatcctttttccattgtgtctcctaggcaactttgtctaaaataaattgaccttaaatgtgtgggtttatttatgggctctttattctgttcgattgattgctatgtcttttcttatgtcagtatcatgctggtttgataaatatagcttaataatataatctaaaaacaggaagagtgttgcttccaactttgttctctctcaagagtgctttggctgtttagagctttttgtgtttccacacatattttagaattatttttatttattcaaaaaaaggtcattggaattttgataggaattatattgaatttgtatgttgctgtaggtagtatggcaattttaacaatattaatcatgaatgtgatacatattttatttttgtcttcagtatgtttcatcaatattttatagtgttgagtgtctagatccttcaaacccttggttaaatatcttcctaagtgtttttttttaaatactatttaaattggatagttttcttgactgcttttcaggtaggtcattatgatgtaaagaagtgcaactgatttttgtgttgatgttgtacctaaaactactgaatttattcattagttctaacatttttttggggaatttgttttctatgtataggatcttgctatttgcagggataattttactgcttgtcctctgatatggatgtcttttgtttctttctttttttttttctcttgcctaattgctctcgttactacttccagtaccatgctgaaaagaagtggtgacagcgggcattcttgtcttgttcctgaccttagaggaaaagttttagttttccctgattattatgttaactgtgagtttctcatagatggcctctactatattgaggaaattttcttctatttctaatttgccaggagtgttagattttttcaaatgtttttttctgtgtctattgagataaccatgtggtttttatctttcattcttttaatgtgctgtatcatttgactgatttgtctatgctgaaatttttgctataggaaatggaaagctatcaaaagattttcataaaggatattttggataagtcccctcagaccactgctaggcaatgggttctcaaaaactaaatatggagaaaagaaagtttgagatgttgctgtaggaatgatgttggcttgtaggagagcctatgggttgggagagaaagggatggatttaaaaattattggaatggtaacctagcctcaaggagagggggattctccgtgctcctttcttttctcatgtctttgatttttgccaccttgaaagttaatgtgattggttagatttcaggacagaataaaggaattatttctagagattaatattttaaagtattccaattacaccggagtcaggttttcccctctcctcctcctcctctctctcttccttttttcctttttctctttgtttcattgtttttattccttttctctatgcattaacaccaccaaagaggcttggagagttagtcttgttctcaccctcacactctgtgtcttacaattttttccctatggcactgttggaggtgcagacatgaggtcgattatattcaagaatcatgcttggggaagggaggagaaacaagataaaggggctttgactcaggactccttcagtccactatcacaagaaaaaggagatttccaaagtattcagaccagatctctagtttattcaaacctgagtcaaagcctcatctaataataaagttacttttctctgtctctttttttttacctttttgtacctacagctcctttaaattaattttatagagaaataattggtttaaaaataattggtttgaaaaataattcagatatttttgtgtcctttgaaacaatattaccttaagaacacctaaacattctttgcagcattgaattaaataatgcatgccttattcataacatgttataaaacagccatttaaataagatttatatgcattaaattgtaaaagggcccagcagatattgtcatttgactaaaaattgtaaagttaaagaaatataaacattataaaagtccacaaaccttcacaccaaactttgaatggtcaataatattcacttaggggtgaatccatcactggaaacagtgatggattgtgacaaagatcattttatatttcactttatggaattcttttgtttaagttattttgagatattgaaaaaatatttcatatataaaattttatgaggaatattaatatgattattattaatacaatgtaatagtaatattaatatatttctaatgtacaaatatgagaaatatattaatatattaatatatttctaatatacaaatatacaaatatattaatatattaatatatttctcatataaatgttaatattcacttttatgtataagaaatattttatatagatttatataaaatttatatatttatatgcatataaacgcatatatttataaatagtataaatatataaatttccatttttattttagattcagtgggtacatgtgcaggtttgctacaagggtaaactgtatgatgctaagggtttgacttctattgatccgatcatccagacagtgaacgtagtacccaataggaattcagttcttgtcctcattcctccctccctccttttggattctacagggtgtgttgttcccatctttatgtccatctgtatctaagatttggctcccacttataaatgagaacatgcaatgtttgatttttttttctgtgtcaatttgcttaagatactagcctccagcttcatccatattgctgcaaatgacattatttcattttttacagctgtgtagtatttcctgatgaatatgtaccacatttgtttatttcaatgagttttagggtacaggtagtttttgattacataggtaagttctttagtggtaatttttgaaattttagtgcacatgtcacctgatcagtgtacactctatccaatatgtagtcttttatccatcacctccctgtcaacattccccaccaagtccccaaatttcattatatcactctatgcctttgcatcctcatagcttaactcccacttatatgtgagaatatatgatatttggtttttcattcctgagttacttcatttggaataatggcctccagctccaactaagttgctgcaaaagacattattttgtttctttttatgactgagtagtatttcatgctctctctctctatatatatatatatatacacacacacatatatgtatatgcacgtatatacatatatacatatatatacagtcatatacatatatgtatatgcacgtatatacatatataccgtcatatacatatatacttgcatatacatgtatgtgtgtatgtgtgtgtgtgtgtgtatatatatatatatacacataccacattttctttatctactcattgataagtgaacacttaggttggttctatatctttgcaattgtggatattgatctttcctgcacagactaaagaacacagctgcaaatgcaatgatgcacaaaggagccatgcatctgagtaagaacctgtctactgcccatggctctcaagtgccaaataatgcaaaatagcccaaacgacaacaccaaaaataactttactaattatcaccttctgtaaaccaaaatcaggaattcaacaacaaacattctgtatgcagccttatccctctgaaattttccaggagtgaagtaaactgactatactaaacttagaccacagttaaagtaatactggctctcctagatgagaaagaataagcacaagaactctggcagtttaaaaagaaaaaaaaactgtctttttacctcagacaagcccactaactccccagcaatgcttcttaaccaatcaattgtctgaagtgacagacatggaattcagaatctggataacaagagagctccttgagatcaaggaaaaagttgaaactcagttcaaggaagacaagcaattcagtaaattgataaagagctaaaagacaaaatagcccttttaaaagagacccaaactgaacttcttgaggtgaaaaattaactacaagaattttataatacagttggaagtattaacagtggaattgatcatgctgagaaaagaatctcagagcttgaagaccagttcttcaaattaactcagtcagacaaaaataaagaagaattgagaaaaatgaacaaagttttcaagaactataggattatgtaaagagaccaaatctatgactcactggcattcctgagagaggagagagaataagcaacttggaaaatgtgtttgaggttatagttcatgaacattttccctaatcttgctagagaggttgacatgcaaattcgagaaatatagagaagctccaccacatactataaaagatgaccatctccaaggcacatagtcattagattcatcaagttcaatgaaaaaaaaacaaaaacaaactcaaaaagccaaaaatgtaaaagcagctagagggaagcggcaggggcaattcccgatcaggctagcatcagaccaatcagaagaaaccttgtaaaccagaagagattgaggatctatttccagtatacttaaaaaaaaaaaaaaattccaaccaagaatttcatatcctgacaagctaagcttcataaatgacagagaaataagatcttcctcagacaagcaaatgttgagggaatatatttcaactagactagccttacaaggggttcttaacagaagtgttaaacatagattagaaagaacaatacctactaccacaaaagcacacttaagtgcacagctacaggcactataaaacaactacacaatcaagtctacaccacaaccagctaacaacaacatcacagcatcaaaatcatacacctcaagactaaatttgaatatacatgggctgaacaccccatttaaaagacatagagtggcagcctgaataaaaagatgagatctaaccatctgttgtcttcaaaagacccatttcacatgcaataacacctacaggctcaaagtaaaatggtagagtaagaactaccctgcaaacagaaaacaaaaaagagccagatttctattcttgtgtcagataaaatagactttaaatcaataaaaattgagaaggacagtgaatggcattacacaatgataacaataaatgtattcaacattggagcacccagattcacaaaacaacttcctcttggcctatgaacagacttagactaccacgcaataatagtggagacttcaacaccccattgacagtgttagccagatcatataagtaaaaaactaacaaagaatctctggaattaagattgacagttgacaaattggacttcatagacatccacagaacactccactcaacaaccacagaattattctcatctgcacacgcagtgtattctaagttctcccacatgctcagtcataaagcaagcttcaataaattttaaagaaattgaaattataccaagcataacctctaatcacagtgcaataagaatagaaatggaaaccaaaagatctctccaatctacacaaatacatggaaattaaacagcttacttcaagtagctcctgggtggacactgaaattaaggcagaaataaaattctttgaaattagtaaaaatgggacacaactttccaaaatctctgatatacagccaaagctgtgttaagaggaaagtacccttcaatgccttcaacaaaaagtcagaaagatttgaaattaataagctaactttgtacttaaaggaactaggaaagaagaacaaacaactccaaagctagcagaagaaaagaaataatgaaaatctgaaaacaccttgagaccagaaaatccatacaaaggctcaacaaaaccaaaagctggttgtttgaaaggataaatgagattgatagactataagctagattaagaaaaaaaagagaggggattcaaataaacacaatacaccatcagaaatgacacaggtaacattacaaccgatccaaaagagatgcagaacatcatcaaagactgtgatgaacccctttgtgttcataacacacaaactagaaaatctaaaagaaatggataatccctggaaatgcccaacttcccaagactaagtcaggaagaaatagaaatcccaaatatactaatatcaagttttgaaattaaatcagtaataaataacataccaaccaaaatagccctggatcaagtggattcacagctgaattctaccagatataggaagaagaactgacatcagtcctactgaaatgatttcaaaaaaaatcaaggaggatggactttttctgtgaagccagcatcagcctgataccaatatctggcagagacccaatgaaaaaagaaaacttcagaccaatatagattatgaacatagacacaaaaatcctcaatgaaatactaacaaatctaatccagcagaatagcaaaaagttaatacaccatgatcaagtaagctttattcctgaaatgtatggctggcttaacatatgcaaattgataaatgtgattaaccacataaaaaaataaaaagcaaaaaccatatggctatctcaatagatgcataaaaacttttgataaaatccaacatccctttatgataaaaccctcaacaaagtagtcattgaaagaacacacctcaaaataataagagccatttatgacaaacacacagccaacattttactgaatgagctcgaaccactcactttgagaactggaaaaagacaaagatgcccactttcaccactcctattcaacatagtactagaagttcttgccagggcagtcaggcaagagaaagaaacaaaagacacccaaataagaaaagaataagtcaaatcgtctatcttcactgatattatcattctgcacttagaaaatcctaaagactcttccaaaaggctcctagaactgataaataactttagtaaagtttcaggatacaaaaatcaatgtacaaagaatttgtatataccaaaaatgtccaggctgagagtcaaatcaagaacacaaccccacttagacaatagccagacacacacacacaaatgctcaggaatatagctagccaagtagatgaaagatcgctataaggagaaatacagaacactgctgaaagaaatcagagatgacaaaaataaatggaaaagcattccatgctcatggataaaaagaatcaatataaaactggccatattgcccaaggcaatttacagattcaaatgctgtttctatcaaactaccaatgtcattctttacagaattagaaaaagtactattctaaaattcagatagaaccaaaaaagagccccaagaaccaaagcaatcccaagcaaaaagaacaaagcatcacactactcaacttcaaactctactataaagccatcataaccaaagcagcttgatactgctacaaaaacagacgcatagaccaatgtaacagaatagaaaactcagaaataaaaacacacagctagaaaccatctaatattcaaaaaggccaacaaaagcaagcaatgaagaaagggccccctatccaataaatgatgctggataactgactagccatatgcaaaagattgatggtggactcctaccattcaccatgtacaaaaattaactcagaatggattaaagatttaaatgtaagacctcaagttttaaaagtcctggaaaaaaacctaggaaatactcttctttatttgaccttggcagaaaattgtttgactaagtccccaaaagcaattgcaacaaaaccaaaaatagacaagtgggacctaattaaactaaagagcttctgcacagcaaaagaaaatataaacagagcgaacagacagcctacacaatgggagaagatatcctcaaattatgcatctaacaaaggcctaatttccagaatttatagggaacttaaatcaacaagcaaaaattaattccattaaaaagtgggcaaaggacatgagcctatacttttgaaaagacacgagtgtccaaaaaacatgaaaacatgctcggcgttactaataatcagagaaatgaaaatccaaaccacaattagataccgtctcataccagtcaaaatggctatttataaaatgtcaaaaaacaacatatactggcaaggctttagagaaaaggaaatgcttatacactgttgctgtgaatgtaaattaatccagctactctggaaagcagtctggagatttctcaagtaacttataacatagctaccatttgacctggaaatctcatgattgggtttatattcaaaagaaaataaattattccaccaaaaaggcacatgtacttgtatgtccatcgctatgctatttgcaattgcgaagacatggagtcaactcaggtgcccattaattttaagttggataaggaaaatatgatacatattctctatggaatactatgtagacataaaaactgagatcatatcctttaaagcaacatagatggagctggagatcataatcttaaacaaattaacacagaaacagaaaaccaaatactacatgttgtcacttataagtgggagctaaccctatagcacacacagacatcaatatggggacaattgacactgtggactactagagggtggaggaagtgggggtgggttaaaaaactacctattgggtactatgctcactacctgggtgatgagatccacactccaaaccacagcattactcaatattcccacgtaacacacttgcacatttgccctttgtatctaaaagtttaaatgtaaaaaagacaaatataagcatgctttcttttttatttttaaagatttagtgggtagaagtgcagatttcttacatgcatatattggatagtgatggagtctgggctttagtgtacccatcacctgaatactggacattgtatctgttaggtaacttctcagcttttgcccacctctcatcttcctgccttccgtagtctccagtgtctgttattccactctatgtgtctatgtgtgcccttcacttagcttccacttataagtaagaacatgcatattttattttctgtttctgagttattttacttgggatatatagcctccagtgccattcatgttgctgcagaagacatgaattcattcttatttatgactgagtactattgtatggtgtgcgtgtgtgtgaatatatgtgtgtgtgtgtatgtatatacatatatgtgcgctgtgaccatacatacacatacatatatgtatatatacatgcatatatgtatacattcacacatatatacctatgtacatatacacacctatatacatgtgtgtacatacacatatacatgtatataggtgtgtgtatatacatacacacacacccaatctgattatttttcagcagtgttttgtatttctccttgtagagatctttcatctactaggctagctgtattcctgggcatttttctggaagtgtatatatatgtatatatgtatatgtatgtatatacatatatatgtgtatatgtatatgtatgtatatacatatatatgtgtatatgtatatgtatgtatatacatatatatgtgtatatgtatatgtatgtatatacatatatatgtgtatatgtatatgtatgtatatacatatatatgtgtatatgtatatgtatgtatatacatatatatgtgtatatgtatatgtatgtatatacatatatatgtgtatatgtatatgtatgtatatacatatatatgtgtatatgtatatgtatgtatatacatatatatgtgtatatgtatatgtatgtatatacatatatatgtgtatatgtatatgtatgtatatacatatatatgtgtatatgtatatgtatgtatatacatatatatgtgtatatgtatatgtatgtatatacatatatatgtgtatatgtatatgtatgtatatacatatatatgtgtatatgtatatgtatgtatatacatatatatgtgtatatgtatatgtatgtatatacatatatagtgtatatgtatatgtatgtatatacatatatagtgtatatgtatgtatatacatatatagtgtatatgtatgtatatacatatatagtgtatatgtatgtatatacatatatagtgtatatgtatatgtatgtatatacatatatagtgtatatgtatatgtatgtatatacatatgtatgtgtatatgtatatgtatgtacatatgtatgtgtatatgtatatgtatgtatatacatatatgtacacattcacacatatatacatacatatatttacactcacaccaatatacatgtatgtgtgtatatacacatatgcatatatgtatatatacacatatgtatataggtgtgtgtgtgtatatatacatatatacatgtatacccactctgataatttttcagcagttttgcatttctccttgtagagatctttcgtctactaggctagctgtagtcctgggcatacacatgtaaacacacacaacatgtacacattttctttattcaatcatcttttgatcaacacttagattaatttcacatctttgctattgagaatagtgctgtgataaatgtacaagtgtaggtatcttttagatataatgatttatcttttaatctgattgtagttttatttttagtttatttagtttattgagaaatctccatactgttttcagcaaagtttgtactaatttataatccagtgagtgatgtataaggattcccttttctccacattgtcattagcatctattggctttttaataatagctattttaactggtgtagatggtatctcatagtgattttaatttgcatttttcagatgattagtgatgttaagtattttttcatatgtctgttggccacttgtatgttttcttttgaaaaatagctgtttctttctaccggaggtacaaggaggaactggtaccattccttctgaaactattccaatcaatagaaaaagagggaatcctgcctaactcattttatgaggccagcatcatcctgataccaaagccgggcacagacacaaccaaaaaagagaattttagaccaatatccttgatgaacattgatgcaaaaatcctcaataaaatactggcaaaccgaatccagcagcacatcaaaaagcttatccaccatgatcaagtgggcttcatccctgggatgcaaggctggttcaatatacgcaaatcaataaatgtaatccagcatataaacagagccaaagacaaaaaccacatgattagctcaatagatgcagaaaaggcctttgacaaaattcaacaacgcttcatgctaaaaactctcaataaattaggtatcgatgggacatatctcaaaataataagagctatctatgacaaacccacagccaatatcatactgaatgggcaaaaactggaagcattccctttgaaaactggcacaagacagggatgccctctctcaccactcctattcaacacagtgttggaagttctggccagggcaattaggcaggagaaggaaataaagggtattcaattaggaaaagaggaagtcaaattgtccctgtttgcagacgacatgattgtatatctagaaaaccccattgtctcagcccaaaatctccttaagctgataagcaactccagcaaagtctcaggatacaaaatcaatgtacaaaaatcacaagcattcttatacaccaataacagacaaacagagagccaaatcatgagtgaactcccattcacaattgcttcaaagagaataaaatacttagcaatccaacttaaaagggacgtgaaggacctcttcaaggagaactacaaaccactgctcaatgaaataaaagaggatacaaacaaatggaagaacattccatgctcatgggtaggaagaatcaatatcgtgaaaatggccatactgcccaaggtaatttatagattcaatgccatccccatcaagctaccaatgcctttcttcacagaattggaaaaaactactttaaagttcatatggaaccaaaaaagagcccgcatcgccaagtcaatcctaagccaaaagaacaaagctggaggcatcacgctgcctgacttcaaactatactacaagggtacagtaaccaaaacagcatggtactggtaccaaaacagagatatagatcaatggaacagaacagagccctcagaaataacgccgcatatctacaactatctgatctttgacaaacctgagaaaaacaagcaatggggaaaggattccctatttaataaatggtgctgggaaaactggctagccatatgtagaaagctgaaactggatcccttccttacaccttatacaaaaattaattcaagatggattaaagacttaaacgttagacctaaaaccataaaaaccccagaagaaaacctaggcattaccattcaggacataggcatgggcaaggacttcatgtctaaaacaccaaaagcaatggcaacaaaagccaaaattgacaaatgggatctaattaaactaaagagcttctgcccagcaaaagaatctaccatcagagtgaacaggcaacatacacaatgggagaaaattttcacaacctactcatctgacaaagggctaatatccagaatctacaatgaattcaaacaaatttacaagaaaaaaacaaacaaccccatcaaaaagtgggcgaaggacatgaacagacacttctcaaaagaagacatttatgcagccaaaaaacacatgaaaaaatgctcatcatcactggccatcagagaaatgcgaatcaaaaccacaatgagataccatctcacaccagttagaatggcaatcattaaaaagtcaggaaacaacaggtgctggagaggatgtggagaaataggaacacttttacactgttggtgggactgtaaactagttcaaccattgtggaagacagtgtggtgattcctccaggatctagaactagaaataccatttgacccagccatcccattactgggtatgtacccaaaggattatatatcatgctgctataaagacacatgcacacgtgtgtttattgcggcactattcacaatagcaaaggcttggaaccaacccaaatgtccatcaatgatagactggattaagaaaatgtggcacatatacaccatggaatactgtgcagccataaaaaaaggatgagttcatgtcctttgtagggacatggatgaagctggaaaccatcattctgagcaaactatcgcaaggacagaaatccaagcacctcatgttctcactcataggtggcagttgaacaatgagaacacttggacacagggtggggaacatcacacactggggcctgtcatggggtggggggaggagggagggatagcattaggagatatacccaatgtaaatgacgagttaatgggtgcagcacaccaacatggcacatgtatacatatgtaacaaacctgcatgttgtgcacaggcacactagaacttaaagtataataataataataattaaaaaagtggtaaaaaactaaaaactaaaaaataaataaataaaataagttattagaagaaaaaagcaaaaaaaaaaaaaaacagccctagctgatggtaattttctttatagtatttctgttttcaatttcatttatttctattaaaatatttattatgttttaatttttttcttcatatttaatttaatattccctttctagtttattaaggtgggagcttagattattggttgtatatcttatttttaatgtatgcaatcaatgctataaattttcctctaagcactgctttgctgcatcccacacatttgataagttgtgctttttgtttcattagaaatatttttaaatttttcttgagatttcttctttgacctattagttataagggtgttgtttattatctaagtatttcgaagtcttcttgctatctttttgttattaatttctactgtaattccattgttgtctgcaagtatacattgtatgattttcatttttttatatttgttaatgtgtgttttatggctcagaatgttgtctatattggtaactcttccacgtgagcttgatcagaatgtgttggataaagtagtctatgaatgttcatgatgtttagtggatagatgatgctgtttcactatgcacttgatggttttcttttttctatatctgtctatatctgatgtgagtgttaaagacttcaactaaaaaaatggattaatctagtctccttgaaacactgagtttttacctcttgcattttgatactctgttctttaggtgcacacacatgaagaatcctcatgtctattcagagaattgacccctttatcattgtgtaattgtccttatctttggtaatttccttgcactgaagtctgctctgtctgaaattaataccactactcccaccttttttttttttttgagacggagtttcgctgttgttacctgggttgaaatgcagtggcgtgatcttggttcattgcaacctctgcctttggtttcaagcgattctcctgtctcagcctcccgagtagctgggattacaggcgcctgccaccacacccggctaatttttcatttttttagtagagacggggtttcaccatgttggccaggatggtctcgctctcttgacctcgtgatctgtccgccttggcctcccaaagtgctgggattacaggcatgagctaccatgcctggccattaaatttagaattaagaccagaaatcaggacaaatgtccactaattaaagctcagatggagcattcagataaggcattatgacaagttagggcacagatgataagagattttgatctaattattctcagaatcttctgtcacagatataaaataattataacctacggaagacatgaagacacattcctgcccccacatccaataagtagggtcataactatttcattacccttcccctctgtttccacccataactccaattcccagaaataaagtagaaaataagaaaaaaacaggtttgggggatttggaaacaggaaggttagaaccatggatgtaaagaaggacgctggagagactgaactggaaaataccgtggaaataatgcagtctaggcttagagtgtgttttctctttctagcaataaaaaccacacttctggtggctcacgcctgtaatcccagccctctgggaggccagggagggtggatcacctaagatcaggagttcgagaggagcctggccagtatagtgaaaccccatttctactaaaaatacagaaattagccaggtgtggtggcacacaacctgtagtcccagctactcgggaggctgaggcaggagaattgcttgaacccgggaggcagaggttgcagtaagccgagatcatgccacagcactccatcctaggtgacagagcaagattctgtcttaaataaataaataaataacataaccaataaccacaattttagtgaagatcatgcccattattataaattttcctttaaagcaagaaaatgtatacctattagaggatttaaattgctagaaaaatacctagagattacacacattaacccagttattcttgtcataaaacacttaaaaagtgatcacatttgtttatcactccagagtaagttttggaaaatacttgagagcagaggcaatgcccaaatctccctggccaaggtaaaagctcttctaggcaattttttattcgagtaggaaataaaaactgtgttgctagtttatttagaaagtgacaaaaatgtaagcactatgcatataattctatgtattatagggaattagttacatagctaggacttttctcaagggaaaactcttggcatatttttaacatttaataattatatgaatatagatgaaatattttaaaatattaacaaatagaacatcagtatattaaaagagtggcatgttattctccaaatcagaaccattttataatagtaatacaataaatactacttattatgctaaatttttttcttacatatgctggacacttgtatatgtacctcacttgtattaatccatttaaaatttaaaagattggccagacacagtggcttacacctgtaatcccagaactttgggaagcggaggcaagaggatcacttgaggccaggagtttgagaccagccgtttgagaccagcctgggcactatagcaagatcctgtctctcaaaattttttttttttaaaagaaaaaaattttaatgtaaaagattcctaagtggagttgatgttatctctaatgaacaatgaaatgaacagagatataagagatacagataattttaataacttgtccacaggtgcacagtccaggaacatcagtaatctaataaacattatataaagtcaatagctgcccaaaaagctcttaacaaaactttggcaactattctcagtgcactttatgagatcactgttagaggggcacttttatagaaaacactgtaagctcatacccaacactccgtgtgttttctataccttccacttccccttagtccaggcaatgcgattaagtagaagtaatttttaaaaatcccttccagatttggcccttaaaataatctacacataggattctctaacttctctaacttcttcactgcctgataacctttgagaagttgtgttccaggtgatgtagctacatgatggtgaggagctgcgggactgaccttggactgtttttgagtgggtttattgtgttaaaccactgaaattacagaagcttttcttttttttctttttttttttttgagacggagtctcgctctgttgcccaggctggagtgcagtggtgcgatctcggctcactgcaacctctgcctcccagattcaagcaattctctgcctcagcctcccgagcagctgggattacaggcacccgccatcacgcccaactaacttttgtatttttagtagaggcagggtttcaccatcttggccaggctggtcttgaattcctgaccttgtgatccaccctcctcggcctcccaaagtgctgggattacaggcgtgagccaccgcgtccagcctcaaaagcctttttatttcagcagttagaggtaatttcttggacaaatacagtgaaaaactacatcaataaaacaaatataagaaaaaattatgactatctcaaactaatattcagtagcattattaatgagaatcacaagatatattacttgaccggcagtaacaaaacagaaatgccagctatttttcagaatacaaagtaaaataaacagaaacatctctaaagatttcttttgcaatagtaataactattcaggaaatataaaggaagaagaatcccaatgtattaacagtaacatgcatatagaatatttagaaataagctaacaaaaatgttcatgttgaagatggaaaataatatgacaagatgttactatgctgaatataggtgaaagtgggaagaaagaggtgtactatattagtcagggtcccagaggaaaacaggtgtctacgctaatcggataattaagaatttaatgaaaagactaattaaagtatgggaaagtaaggggcacaaacacaagtgtaagaaacagtgatgcactctgggacttgcaacaccaggaagctgttaccagctctaggcctgaggagcatgggaaaaacaaacaaacaaaaaacaaaaaaaaaaacaatttacaaaacaaggggggcactgagaaaagtggctaacaaaacaacctgttatctcaggggttcaagaccaccctggccaacatggcgaaaccccatctctactaaaaatacaaaaattagccgggtgcagtggcttgcacctgtaatcccagctactccggaagctgagtcaggagaattgcttgaacccaggagacggtggttgcagtgaaccaagattgcgccattgcacttcagcctgggcaacagagcaagactacatctcaaaaaaaaaaaaaggccattatcaggaaagctgggatataaatctcacttccctcccacctcccagtccttgtcagacctgtacatgggctgcacctaattgagagttggagggcaagggaactcgtgagtatattaataaaaactagcttcctggacatatagcagaatgcaaaagggtaaaaaataaatctgggtgggtaaatgtgatggaatactatactgtttccctaaattggaagttgaatgaaaaaaatgtcagtagtcccaccatcatttatagatttaatatgattccttttataatactaataagaattggggacacattatgaaataatccttaagttcatctggaaaaataaagaggttaaaaatgataataataaaacaaaagactggcaataatgggggaattatttttacatatacatacatataataataaaagtcatttgtacaagtttatacacatacatgtaaattaataggatcaaatgaatgacttcatctccaacacaatcatttgcatgcatggataactacatttgtgtgtatgaaacaagagctaacctagagacacctgggaaggctagacacttgtcagattgtttttcagacctacatacttagtctgtttctgttgctctaacagaatgttacacactgagtagtatttaaatatatatatatatatatatatttaatatatattaatataaatatatatatttgtagttctagaagctgggaagtccaaggtcgaaggtccacatctggtgagggccttcttacagcatcataacatagtggaaggcatcacattttcagagggcaagagcaggcaggctagttcagctctctctctctcccttttttttttttttttttttttttttgagatggagtctctctgtctcccaggctggactgcagtggcacaatctttgctcacttcaacctccacatcccaggctcaagtgattctcctacctcagcctcctgagtacttgggattacaggtgtgtgccaccacatccagctaagttttgtatttttagtagagatggggttttgccacattggccaggctgatctcaaactcctgacctcaggtgatctgcccaccttggcctcccacagtgctcagattacaggcatgtgtcaccatgcccagtccctctctcctcttcttataaagccactatgccatcatgagggcccccacacacatgaccttaattctaattacctccaaaagcccccacctccaaataccattaacatacgcatttggggattaagtttccagcacatgaactttgggaggacacattcaaaccatagcattctgcctctggccccaaaatccatgtctttctcacatgcagaatacattcatttcataccaatagccccaaagtcttaactcattccagcaccaactcaaaagtccaaagtctcacctaaatcatgaatgagtgagactgaaagcacaatttattctgagatgaatttccttcagctgcgagcctgggaagtcaaacaaattatgctcaaaatacattagtgggacaggcatgggatagaaatttccattccaaaagggagtaataagaagaaatgagtaacaggctccaagtaagtccaaaacccaacagggtgaacaacattaaatctcataccacttcctggttggagtggggatgggcccccactgcctcaggcagccctgcccctgggactttgctgggttcagcccatgcttccgctttcccagggtggatttacatgctggtagctctatacttcttaggtcctggtggtggtcccactccaatggctccatttggcatttccctggtaggaactcagcatggcagctctgcccctgcagcaggtttctgcctgggcctgaatgctttctatgacaggttttggaatctagatggaggaaactgtgcctccgtagctcttgcattctgcactcctgcagtattagctccacatggacactgctaaggcttatggcttaggccttctgcaatggtggtctgaactgcaactggggctgcctgagccacagctggggctaaaaagtgctgcaccagaatgcagtgagcagagctctgaggtggcacagggcagtgagacatggagggatcccctggccagacccgcaaaaccattttgccctcctagagctctgggcctgtgaggggccatatcgatgatctcagaaatgccttcaggactgtttcccctttttctcaatgattagcacctggtcccttctattcctgctcatctctagtgaccagtcactcagccacacccttgctgtgttctccctaacttgtttttctgttcttcacattgccaaactgtgaattttccaaatttttatacttggcttccattttaattattattctgcttgaaatcatctctttgctcccatatctcactgtaagcattcaagaacagccatgcagtatccagaacactttgtggcttagatttttttttttttttggcccagctcaccactcttaggttccaccttccataatgtcctaggacatggacataatgcagccaagttctttcctgctttataacaaggatgacctttatttctatctgagaccttgttagaatggcctttcctgtacacatttctactagcattctggtcatgactacttaagtgctctctaataagttcctgactttccctcattttcttgtctcttatgaatcttcacaagaattacccctaatcctctgcttctgccactatgcaacacgcttttctgagcctgttgcttcacattcttccattttctacccattacccaataccaaactacctccaaatattcaggaatttttatagtgacaatcccacatctcagtaccaattttctgtctcagtccattttctgttgctataactgaatagcacagattgggtagtttatttttaaaaatagatgtttatttagctcatagtcttgttgtcaccaagttcaaaagcatggcaccagcacctggcaagggcctctgtgctgcaccatactatagcatgaggtgttctcatggtaggcaggcatgggtgcatctgctcatgactttattcctcttcttataaagccaccagtctcatcatggggtctcagcctaatgaccttatgttatcctaattgctgcccaaaggccccatttagtcccacctcttaatagtatcacaaagacaactgaattccaacatgagttttggagaaggcactcaaaccatagcagtactcatacactcataccctttcatcatatgtaagaatattgcaattatttcatctttaaatctgattgtggggaagatctatttctgacacatggaaaatccatgtcccagtctctaagataagaaccaagtcccagggattttcttttaagtcagcgtctctgctcatattataatttcattcagtggatatgtattcctaaatctactttcaatttaactgatattcccccaagatggattcagataaaaagctgggccttatgggacaggattccttcatgaattcagcactaattttctcctcctgtcacatcttctgcagatatacggagagagctttaatatagcatcctccatgctgccatctggggaaattcttaatcaacacaccctcccagacaaatgggccatcaagtgtttcacagatggatgggacagtcaggccgccccgaattagtgggcttggcttatctggtttttttctctattatttctgttcccctttttgcagtctctttgctgtaattgaattatgcttataactcacgtcttttatgagcatagctcaaacacaccttactggggacaaagctgctagtactcagcatgaataggtgttttgaagccaaagaagcacgcatttctgtccttaaaaattcttacagtgctattctgatggggagacagtctgaaatatatataggtaggccagatttcaagagaggagatagagtaatttggaaacttaagcattttggtgcctctctaaaagggacaaggatgccattctacacaactctggagagcatggcgacatttcattctttgcccctagcaaacttagaacatggcgccctggagaggctcacattcacttagaaaaaaatacaatagtgagcatacttttaaactgctctttttataagactcaacatatactcagaaaaattccagttgggatctgtggaagagaaaaagtttctgcaaaattggagaaaatgtgtagcacagtattgtcactatgtgtgtgcaagtgaaatgtaagtgctttagtaaagttcttaagctcaccctcctctatgtctaccttcaggactcagccatctctgagcataaacacatgaaaatatatgctaactcgtatgaaattcaatatgaatatttgagagctttctggggctgggtgtggtggctcatgcctgtaatcccattactttgagaggcagagacagaagaatggcttgaggccaggtattccagaccagcctgggcaacatagcaaggtcttgtctctactaaaaataaaattaaaaataaaattacctataattggtggcttgtgcctcaagtcccagctgcttgggaggctaatgtgagagaatcacctgagcaaaggagctcaaggctgtattaagctatgattgtgccactgtattccagcctgggtgttttcaaaaaataaaaatagaaaagagttttctgggaaggaagagatcctaaatgaagccatcagaaacaactagtttgactcagctgcaaagggtttgctaacgcaagtgagaaataattctgaatacagaatgaagtccaactcctgggaaattctttggattctagcaagaggacaagagacacaagtaaacagaggtcaatgccatgaggatcatgtgagatacaggcacgcaagcaggattaagatggggctagagaggaccgcaaagaagatgaatccatccatttcttcacacaccacccccaagactgggctgcatcagggacccagcctcctagtgatgcagttgggaagagaccacagtgcctactgaaactgcagtaaccgttagtgagagaaggaagaagcaggcaagagaatgttggtgtattcaaaatagacaacctgtcaaaactccaaggactatgacgggaacttttcaaggagctgggccatgtgagcatgtggctacctgagctaggaagtccatgctattactgtcattgtgacccagtctgtaccaactagctggtctgaccatgcaagcacaggggatatactacacaaagcattcctctttttattgagcctcaaaagaaactggaaactggtgtctagatctcaatggtgtggagatgagagccagatgagtccatgtctcccatcccttagccagcactgtccatcttggaatgttaagctgcaagggcaaatgatatcttactgtggtcttctgacccagtattccacaccacatttaaatattgtcagtgccactattgatttaggcatgcaaaaatgagatccttcaattacagagaacaaacgtgctgtatataatgcatttcagagatatttattgcaattctcatagcaggatcctgatggagaacaaagaaattaaagctcagagctacttgagcactcttctcttaagaaacaggggatctcctacttcctgatgtcacttgttctctcttcagcttcttgaccactgcatagcctaatctggttgcctgacacttgttagattcagagcttcctgctagccactgtgcaaaaagagaggaacaatccacaccaagacaagaaaaccttgcttaggaggagaatggaatgattgcaaacactatgagaataaagactacacctgttatatttgttgaagtattcccaccatatggtccagtgctgaaacatggcaggcactcaatgagtttttagtttttcactcaaaattaaattaaaataatgagatgacctttatatcagaggtgaaaggcttagtgagtggaaaggagggagaaactaactgtctaggttgtgtgcattgatggagagtggaagacactggcaactgagttgcagacctgggctggagcaagttgtcctgactcctaaccagttgtccattcccatgcactgcaccaccctgactatgaacttgggtatggagggcatgggtagtggtggctcccctcaggtatctccaggccctctgccctctgtgctggcagtcctgactgtgaactcaggcatggagggtgtgggtaatggtggctcccctctgggtatctcaaggctctctgccctccatgctggcagtatttgccagtgcaggtgagggcatggtgaatgaagcccctcatatcagagtttgacttcagatggtagattttgtgtgagtgatgcagcaggcacacattttactcattttaattttttcaagctttactgaggcataattcataaatataaattatatatatttaatgtgtacagagggatgttttgatatatgtatatactgtgaaatgattactgccatcaagctaattaacataaccatcaccacatagttaccgtgtgtgtgtgtgtgtatgtgtgtgtgtgtgtgtgtgtggtgagatcacaagatctaccctcttagcaaatttccaggatgcaatacactattatacattatagtcaccaagctagctatacataagacctccagaatgtattcatctcatagctgaaagtatgtacccttccacccaaatcccccaatttccctcacccccagtccctgtcaacctattttctactctgttcctatgagttggacttctttagattttacatataaatgagatcatgcagtatttgtctttctggggaagaggttttaaaaccaacaacctgttccagtgactcccctcctttgagtgtgatggtgacaccttgcgtcagtgacagtcctcacagggaggctgaggctgggccagctggaaagtgatggtcagtgaggcactgcgtgggactccctgaaactgatacaacagtttcatacagtttcagcagtacatgcacacctggagttgccaccagattctcttcctgaactgtgggctccttgtgggggtggatggtgaagtctcctggtcattaagcccctgcagccccagggcaagctcccctctgggtgaggatggagactcaagactcagtagggcagaaatacatctccattcctgggttcctgcagctagctttccctcctggaaatgagtttgggcttcaccagttcactctttggccagccaggttcccttgatatctaacacattctcatcacaatgactgaggtgacagtgggacttaatgttttcatcttccgtgcccttgtgactgacagtcataaaaatgttcattcaaagaaactagccatgtcctgtgcctgaccaaccatgaggccttccaagccccacccaggcatcactgactccttccagcttcctttgctccccaggctgagttcagcctctgcctgtcctgtattgcagagcaccttgtcatccctccttcatgtagcctaggtctacctgttgggggctagaattttctggtccttattatctttcttcttggtcttaatcctatgaccaaggtgaaaaaagcagtaggagaagttgaaaattgagtacattgaagccttgaccagctggtaaacagattctatcttccttgatgcagaatcaataacctacaactttagctgaatttctcaggacagccttctctgggacccatctctgtcccctaaaaatttcagaatgttctatcttctagcccaactgaacctgtgtgtgtgctttgcagctgtgagggccattgccatgagcacctacctgtgaagtaggcgtaatgctgttccttccatcctcatggccccagaatgttttcccattgggctgagttgagcccagttgagtggaaccacttcttctattcaagcatcttggaatagaggtctgaggaatccagactctccttacttggctctgggctgcctcctcagagctattagccaaattaatggcacatctataactggcacagcagcttgtgtctgggttctggtatatttatctggtaaatgttctgtaaaatcatattatgaaattaaaacaagatcttaataaatcacagtgtatgagatttaccaacaggattaagaagacatttctggaggcaggaattgtgcttgtttcccaaaggtatgccttgcttggtactgctaaatgctgcactggggtccctggagtggccgagagccctgtggctctatagctcagcaagggtgtcctggagttgatccaagttgtgaaatgttccttacatctccttgattgtcaagctctcactcctctccacagctcagcaagggtgtcctggggttgatccaagttgtgaaatgttccttacatccccttggttgtcaggctgtcactcctctctgaaatacatccagctcttgaccacttctccacctggtgctcatgctttagttcaggtcctcaaaatggatgattccagcagcctctttactcatcacctatcacaacatcacacgggctctgatttatcacacactcagccctgtcatgatgtgcttccccaaagtgcaccccagcacccccaagccagacaccttccaatcagcctcctacccccacactcacctccatatttctctctgttgctagagtacgtgaggcacatcagaggtcgcccttgtccttaggctgtggattggatttaactaactgggagtttgagagatgcaaggagaccagaatgagaaaggaggatgaattcagtatttattttgccactgcttttctgtgaggccatctcagcctggttgtttccctccaacaaaggtcaaagctcctcttaaagaggcctgctctccatgattctgtccttctgatgctagaaataactttctccccaaatccctttgggcctgatacggtcactagaaccatgttactgccctacttatgggcttgctgaacactccttgttaaaaagtgataaaagaaaaacttcagctaaattaaatttaaaagagtttaattgagcaatgaacaactcatgaatcaggcagcctcctgagccagagtaggctctgacactccagagcaaccacatggtggaagattaatgggcagcaaaggaaagtgatgtagagaaaatagaagtgaggtacagagacatttgggttggttacaggtgtttgctttatttgaacacagtttgaacactcagcagtgtatgagtggttgaagtatggctgcttggattggctgagactcagctattgttacaggtacatactcctaaattaggttttcaatctcatctacctactaagttaggttgtggttagtccacagggactcaaatacagaagtagggagtccttctcaggccacatttagttcgctttcactataatagtccgtttattgaattgtccctttcttattctaattagagttgaccatccttttcctgaccagccttcaactagcacacttatctttctaaaaccattcagggtttcacattaaactcacaaacatttttctcaaagagcagagccagtccagggagactccccaggaagggagcctcactcttttggttcctgcaaattttctgccatagctctttgttggttgaacccaactagatgttggaaaacaggggtttgtgaatgtcatagacacaacatccttcctcctggagcaggggcagggagaagagtggagagggggcatgggggtgggaatgaaaggtagcacagaatggttcctgacagaggcttcaacctctgggtgatgctgaggaatcccctctgggtgtgtcacatacagctgcagggggaggacacgtctagcaagaggaagacatctgggatgccggacttggagcagttatgctcatgatgcagggaagattcgcagagattccatattcggtgggaggggttccttgagatctgagagaggaggacaggtaggttcggagggagaaaccgcggctcacactttcatcaactcgtgagctctcagtgcctgaaggcagagcacgtcttccccattagtcatcagcattcagaagcagaaaatcagagctcgcctccctcctaggtgtgtgatcagctgccagaccctgagaggagtgtttcctacccaggccttttctccacagatgtgcctccttccttctccttaccttccgtctgtctctctttccctttctcttactatgtttctttgttttcattcttcccctgctcagtgtgactgttgcgatagtgatctctcccaaacacaggtcacttgggccccttcccacctctatcttcactccattctgcagagcaattccttccaaagcatcaagcatgttcaaatgcaaattgcacatcctaagaactcccttttgttcctaaggaatgagcccaacaccccggggagaccctgaaggcccttctctccctggctccagtccttctttctaatctcctccccacccccatatctccctgtgcacattacacacacccaagcagcttgtaggccctagggacgccctgtgtttccaccccaaatgctttcaccaggagattccttccatagaacgtctcttcccatttttcctcctagcccaaccaccatttcctctatgtaattttcacttcacttctttaccggtgttttcccagcatttcatattaatcattttctcctccataatttataatgtcttctgtattctctttattggtcaggagtgacaccatctttacaggactctaaggggaaagtgaaaacagaaaactgcctttgcctggtctctcctcctccctcataactaatcagccatccagatctcactgatttagcctctaaagatttctcaaatctattcctctctcccttcctaccgccattgccctacttcagatgcttgtcatttctctcccagaacatcgcaacagccttaaaattggcttccatgcctccggtctttctcctcttcaatgtattttccattctgcagtcactctgtactcttccaatctgtctaaaacacacatctgaccttgtccctccccagcttaaaacaccttcaactgaggaatacagtctaagttccctggcccagatatggccagagccccattctccagcctcatggttgacacctgtgcttccactgctccctcctgagcacgtggtgtccagtgcagcccaggacatacctctcccatctgtcctcttggtatatgaggtccctgtgcaggaaatgcctctcactctccaacacacacacacacacacactcaacacatgttcattcacacacagtcttgttggcttggtgaactccttctcggccttcaaaactcacttccattcttgctccacagtctactcctaactggccgtctgtagcatagggatctccaaactacagccccccggtcaaatctaggctaactgcttgttgtttttgtaaataaaattttactgaagccaggcacagcgcctcatccctgtaatcccagctttttgggaggccaaggcaggaggatcatttgagcccaggagtttgagactggcctgggcaaaagaacaagatccatttctacaaaaaaaaaaaaaagaaagaaagaaagaaaagaattagctgggcatgttggtgtgcacctgtagtcccagctactcgggaggcagaggccagaggatcacttgagctcagaagttcgaggctgcagtgagctatgatcacaccatttcactccagccttggtgacagaatgattctgtctcttaaaaaagaaagttttattgaaacacagcatgactttcattggtatattatctgcagctgcttttgcactacccttgcagagtggaaaagtcgagacagagaccataaatatttattctacagctgtttaaggaaacttctctttatataaatatatttaacctttatatatatatatatacacacacacacacacacacacacacatatatacacatatatatacacacatgtatatttgaatatttgaagaaatctgagaaatataattttgagtgaaaagcaaatttcacagtgatagtcacagcacgcacacagcttctgcacatgtgaaagcatacacaaatcagcacttgtaaataaaaacatacatataatacaaaaatttacaaatagactgaaagatacacattaaatacatggcaattattttctctgaagagaagaaaggaaaaaatttaggcttgttgccaaagggctttagctttatttttaatctatttattttaaaaagactggatgtaaatatgacaacctattaaaaactgatcatttggggcaggcacggtggctcatgcctgtaatcccagcactttgggaggccgaggtgggcagatcacgaggtcaggagttcaagaccagcctgcccaatatggtgaaaccccctctctactaaaaaatataaaaattagccgggcgtggtggcacatgcctgtagtcccagctactcggcacactgaggcagaagaattgcttaactcgggaggtggaggttgcagtgagccaagatcatgccactgcactccatcctgggcgacagagtgagactccgtctcaaaaacaacaacaacaacaaaaaactgattatttgggatagtgaaaataagggcacttattgttttagttttttgctttcatattttcagagttctcaacataaaaacaaacctttcttcagatatcacccccgttcagcccttctccactccttaatttccacatggagatactggcccctctcccacactttccttcattccttccacacactgaagtgtgatatgatcaaggcagttgtcaacattgtcacttgtatgattgtctttctcattggaatgaatgtgagctcactgaggacaagtacgattttgaatttatgccctagtgcgtgtccgaatatgtttgagatgagtttacctctcttatgcctgcaacaaaattttattttgtttaaagggtagttatttttttcttacatctccctaattagccaagagctccttggggccagggatatgttcttactgtcctctcagtccctgtggcccggcatccagctatcactcaaggaaggtggaaatgcgggatcaggacccagggcttggctccagacagcccatctccagtagaggcacaagcagtgggcccagctttaacttccgtaactgcccaggatgagaacagacagggagcaaactgagtaatggactaaaaagcaaggaacttggagagaaggttagaggagatcagattgtttacccaaagcagagactcaaaggcaagtgcacaaatctctgccacatgcccttaatttgtctactgctctctggccactgtctctgttttttgtttttttttttactggttccctctccatacatgaccatgaaccactagcataaggaggtgactgtcaaagtgtggtctcagatcagcagcagcagggtcacccgggagcttgtcagaaacgcaaatgctggggccgaccccagaaaccctgctacacagtttggtccccagccttccccctctatggcctaccttcacctctcaccttgggcaaatccacagtctcccaaataatccattactgtccggcactgagatctgtaaattcagggctctagcacagactcacccttgaactccggtcatgcctgagcaaccctctgcccccacttagcatctctgcttagagctcctgaaggccctgctgactaccacgtcctgggtgtgaactacccccaaatctggccctcgatccagctgcgtaacattgtcttccatctatataacttatctggaaagctctactattttctcaccctgttcccttccttaatccaccaccaatccccggatattttacattctacgtgtctgttacatccacccacccctgtgataaccatggcacttctgtctcagggatatttaaacatgaaaagggatcctgtttttccacttaacatggcactaccagaccttgcacagcctgaccatgctcctctgacctcaccgggcgacagcctctcccttgctctttgaggcccaggaacactgctcagcttctcaaacaggccatgcttgtgggcgtcacgaggcctctatgcgtgcagccccttcccttggcactgtctttttaccccagcccaccttcacctatatttattcctacttgcctttcgtagctcagttgtaggatcctcttgggggagactttctgtctgggcatatactttttgtttgttagttttctatagctgcaaaacaagttaccacaaacttagagacttagagcgagacccatttactggctcactcttatcttagggtaagagtttgggcaccgcatggttgggtcctctgcttcggggtctcacaaggctaaaatcaaggtgccagctgggtgctcctttctggagactctgggaaggaattcacttccaaactccttcagattgttggccaaattcagttccttgtgattattttttcttgtgagctgtcagccaggggcgctctctgctcctagaggccatctctattctttcctaccttgtccccttcatcttccaatccaggaacaaacaatctccctcacatcaaattccacccaagctttacatctccatctccagggagaatcctggttttttttttaagtgttgcctggttagaacaggtccactgaggataattcttgtatcttaagatcaactgatttttgggaacttaattacatctgtaaaatctgtgacaccaacacatagattcttgtttgactgaataacatggagaaggtgtatacatgagaaggggatcttggtggccacccgagaattctgctgatcacacagtcttctgacgtttgattcacagcagtctcctccaccacctttctaactttatctccactgagcacccttcgcccacactgggctggaggtttctgtctctgtgcctttgctcacgctggcgcctctctctggaatgccctcctctgtcatctttgcttaacaccaccccagtccctcctgtcccctcttctctgtgtccctgtagcactcgtcacatctaggacaaagcactagcaccgtccagcatggagtcactgctgctgagctcattagccctggtcagcctggcagcaggtggaggacaggaagtggtgctcattcctcgtggcctgagcccacggcacccaggccatggtggggtgcaggttagatgctccatacgttacagagtgaactgaaggaagtgaaacctggagacctgcagagtgactgctgagaggaggatgagaggagaaaagggagagggaagtggaggataattacaggagaaggctcgggacctcccctactatctgcacatggctttcgctccactcacaaaaggtcagtaaagccggtgccactggaagtcttggataagctacctagggtggggctgaggggctgcttttagagtgggggccccattctccatgtcacactcattgaccctcacaaaggatcaggcagtctgcagaacagacacaagtttggattttaaaaatatttatgcacaataaggttcaaacttttaaagctgatatatatagtttagctaaagttcaagtagctatgcagagaaagaaaggacatgatccatgtcccagaaattatccaagaaaatgtgagtggtggtttacatgtttggatttggggagagatcgtttgggttcaggatgggcagggcagtgccttttctctgggagcctgcctggtgaccctgaggacaggaccatctagaatgctaagagaaaccctcctcataccagtggggatctgaggtctcacagaacatgaagaccatggtggcagaggctgggcaagctcctaggctgggacttgtccacacatcccctgataggagcatcatcacaaagcaaagcagctgcacccacaataagtagtccccaggcatttgtcctgctttcctttgcttgtgtggttgcaggagatatgcagactgcactttcagggaagagggtgaggttgaagggaagagcagtgctggggtgaaaagagcaccagacagggaggaggcaagctgaggtccagccctcccagtcctgactaagtaactcaaggtgagcagctaataaaatagtgcagccagcgttagaaaaaaaccagacatcttattgtgtgaaattatttctattatcatagactagaatccataagctttaaaatttttaattgccaaaaaattctaatggaaaaggtatagaaatgctgaaatgtctacttttgactgtcatttaccacttcagcatggcgatggcaatggctttcgtgtatttagtccctcaactcactgtgcagttgctttgcagaggcagcagtcatcctgccagctcttggccttccctgccacccagcagagtgcctgctgcccagtcgggtcatctggcagccacagcagaactcgctactcttggaaaattgcttcccatactctaatgtgccctgttggcatctgtggagacctggaccccaaaaaactgttcaagactgaccataaaagatttagagctggagatattactttgaaaatacttcctaatatataaattatccggaaacgggctccatgcctgctcattagggcaatgttttaacttggcttccatcctagagtattatcggtccccacaattaaactaaaatataagtgaggctttcatggggtgggaaagaagggagtttgaaatatcaattggttcaggatgcctatgaatatatattttccagtggtggtgcttgactctcaaagccaggtcctggcagctgagcctggccaatagcattggctttgttctgcgatggcagtggtgagactggtaggattctttatttcttttatagaaaatcaaggtaatgattagagcagtcactggagtgactgaatgcttctttgtgctgggaactatactaaattatttaaagggattaactttttcagctgtcgaaatgaacatatgaaatgggtcttattaacagacccagaaactgaggcaaaaagctaaagacatttcctttagtccagggccacaaaccagcagctcagagggaatttggacatagacttttcttttttctttggccaaaatagaaataacaacgtgtgtgtgtgtgtgtgtgtgtgtgtgtgtgtttgtgtgtatgtgtgtttgtctgtgtgtgtgtgtatttttctatctttatctctatttctatctctttcaatgtctttgggcagggcataaaatgcccaatttgccacagaccccaccagtccctaatgtctttcaccttgcactctacacatatttattctacccgtttgccccttgaagacactgagttgttaacttcgcgtggaccagtcaacagagctagacttggtcaacagggtggggcggtgtcttggggaaacaacagtaccctaaattcagttcttctacaggaggggctcacctagctcctctgtctttcttatctcttttctagtcctgtcactgaagccacctcagaccttttcagagctttgtttttggaaagtgtctcctgttgggctctccagaagcaggtgctgagatagaggggtgaggggcacgagttgtacggagatcaacagctaacaggactgggagaaagcaggattgggaagaggaggtgaccgagtagtcaaggggagctgggcccagggagtcctggccaggggggagcagcaggtggaggacctggagtcctaagtccagcttcagactaaagaggtcaggcctttttaaccaggccctgctaagtccctgctaggtgatatttagaaagtgtgcaccagacaggcccagaagccagaggctgtccgctaaccatactccagtagctgggcaagtcccccccgaagggcccctgggcagccgtctccacgtcaaccacagaaggcatttccaactccaactccagttggtgttaaggtcagatctcctctctggtgtggcctatctgccggagcaggtggactctctctgggtctgtgtgtcctgggcggagccacctgggatccaaagcacaactaggagaatctggaagggggagggaggactgaccccacatttgcatgacaagaagctctaatgtcaaccttcctcaaggccatctttctgtgcctcaaagaaccctttgtctaaacctaatcacctcccaaaggccccatctgtaaatgccatcacattgtgggtaaggacttccacagatgaatttgggggaacacagtttagtccataggaacccttactatgaaaggcatcagagagtaaagacatctcttaggctgtctctaggcagacaaagatgactgagcacacccattttctaccttccaaactgtaccatttgttttccttatggtcctgtagagtgaggtgaccagtagtattttggtttgatttcttagaaaaagctcaaaccaaaatgaatttcctaacattttcacctaaaagctgtaagcccaggctcagcagggatgtgttttcactctcaggagaaagatgttagggatctagcacaactttcttcctccccaaattctctttcagacactctgggagaacttgagcaagggtgagggcctcgccagcacccagccatgcacccatgggcaccctggccctcaggccgccagcctccagaacagtgagaaaatagaaaagggatttctgttgtttcagccaaaaaacataccttgcatgcacattagttttctattcgagagccctgatatccccctcggggtttctatgtgagcacttgaccatgtgtgagtaggaggggtccttgctcagtgcccaggtgttgcgctgtaccccatgggttccagtggggatggcactgtgtctgaggggctaaagaagagacctaagacagcaaccaagacacagggtttattgaggcgacttgcatagagggtagtccagtagccgcaggctggacaggagaaccactacagtttgtaacaagcatgccattcatatagcatttcacgtagcaccctacacttaacccaaaacaaagggcctcgactccccgtacagactgggttccaagggatgggccaggggttcagatgtccttcatggataaggagtggatttctttctttcttttttttttttgagaaagagtctcgctctgtcacctaggctggagtgcagtggcacaatctcgactcactgcaacctctgcctcctgggttcaagcaattctcctgcctcagcctccctagtagctgggatagacacacatcaccatgaccagctaatttttgtatttttagtagaggcagggttttgccatgttggcctggctggtcttgaactcctgacctcaagtgatctgcccacctcagcctcccaaagtgctgggattataggcgtgagccactgcgcctggccaggagtggatttctgagtggaactcagattcgttagctcggggctctgaacacacattcttcttagaccatagggtcattcttggggtcggcttcagttatggctgtcagggggctctgccacacccaggggctgttcgatgctgcagagtgaaaggcagtagctgcagttgggaacctccctcccctccatcccctaccctgtgtcactgacgaagacgatgccactgaccacatcccgcatagggggaaggctttctgggaatgtcactcctccttgacaaggagcagggggctcccgccatgtcttgggtgtatgttcctgaacattgggatgatgggcaatcttgggctgcactttttccaactctgctcctggacccgccctcgtgctgtgggtcccatccccaggccctaagcagctgcttaaatggagctgcagaagagccaaagcttccatcactctcaccctctcttagcttcagtcttgactccttctctgagcccctgtacccatcttgtgctgcctacgtcctaccttgggctgctcggtattggctggcacaggagacccagagctccgtgacatcagggacggggctggctctgtggaatgatagctgccaacccagcctggtgcctgtgttgtgcaggatgcaagagccgcaagcatatgtgctgccactcggggcacctatgtaagggcaaggacaggacaggctctgggggctgcaggtgatgttcccagtgaagaaaatgttgtggcataatgttgtccctggtcatttctggggacccacagaactacctattctgtgtatatgatgtctcacttcattatgcaggaattttggccactatgaatgagctatgaggaaaccaggtggcatttgtagcatttcagagccattctctagtgcactagttctattagatagtctacaaatcagcggggagggcactggaagggtgagtttttaatacatttgaaaatatttcatagtctttttcctctttgaaattcttacagtaaataaaacaagtttaactcagagcttcataaatgtaagtggccatgaaactctcccttttgtgggacaacctcctgccactgacaccccctttcacgggggaggtggcctgcagtccccagagcctgccctgtgatgtccatcagaagtacctgggaagggtagtttgagaagcatcagtctgactttctctttagaaaatcaagcccattccacagatatagtcagatatctgtgatgttatcaactggcctgccttccaattcagtgtgataaacacttattaagcccccactgggtatgaaatactgagacaggtggagtgcgaaagacagataaagaatgcttctatgaagcttagagcctatgacatgacagaagataagttaggaagaagaatggctctacaacaaggtaaattgcttttcttattgattaaggtaagtgttataaaatagacagaatgtcatgggagtcaaagttaaaagagaaaaaatctgtatccagctgggacaaccagagaaggccactatcctgaggtcctgaaagatctttccgcctgcctgcctgaggtcttggcttgggtatctcaaaccaaattcaagagcctgaccctataaacccggtgcttctcccctgttctctctctcagaagggtaccagccacctgctgcataggcagacaccctgaagtcttccttgtctgaccctgcccggccatagagaaatgtattcatggtgtttttgtctttctctccagcacttgtgtcagcctgtggtgtcaaacctatgcatgtgttcatttaatgagtgtctacctcccccactctttgggagcaccccaagaacacacatgtaatgttcctgctcatcagtgtagtctcagaactgggttaattcctggcaccgaggagtctccaaataagtgacgctgaataaatgcctgaaggaacaaataaacaagcgtgtggactgatttcagaactcacccttgattgagagttacagtgtgtagaaatggaggaaaagcattttcagggtggaaggaatcagaggagcaaagtcactgatggcagcatggatccttgatagaatcctggaatggaaacaagacactggcgaaaaaactggtgagatctaaataaagtctgtagtttaggggagagtgacgtgctaatgttaatttctcagttttggcagatgtgccctgggaatttaagatgtcaacattatggaaagctgctgaggggtagatggggactctctgtaccatctttgcaaagcttctgctgtaatctaaaatttttataaaattgaacatttattttaaaaaaattaactttctttttgccccagaggaaacagagaccatcccagtcaaattaaagaaagtcttggtagttatgaccaatatcagagctttggtcctggagtccttggaattaataaaaggaacacacttaagggtgtttttctaaaaacaaaacaaaacgaaacaaaaaacggggtgagattcatggtgggccacagcagaatgctgggggtgttcagggcatgtctctgacaggtgaggcacagaccagcagagctccttttctcctccccaaacttttcctgctgttcccttgccagatactggcttgaggaaactgactcggaggtccttttcagttgaaggctagctcaaacctccagactcctgccctgggaccctgtcctgccaaaatccccttagatccctgtcactagctctgcatgccagtcccacagctctgttctttgctggtccttctttgggggtcggccctaagatgctaaagtggccctgcccatgggaaatgcaggatggctcacagccagtgactggctggtgtgaggctgcaccacacagctccccgctaggctcaggacagactctgaggtcgactcatgctccagtgctccctgtggggtctgcctatgtctggggcttctcctgaaatcacactcttgcttggcttccttctttctgttttctgtcctgcttcttccacacccttggtggtggtgtgtgtgtgtgtgtgtatgtgtgcatgcacagacatttttcagaatttccgtaatcagtccttgctttaaaatctaattctaaaaaatccagaacccagacactaagaattggttttagcatcacaagacctgccctcaaaatctagctgtaatacccaccagctgtgtgaccttggagaccatctccccgcccctcttacctataaagtgaagataatcacatctgcttcttggctgatcgtggtgcttacacaggttaactggtgtcaagtacctggcacctttcctcagtccctgagtgcacagttcctgagcatcctgggcccctcttccatgtgaaggctgtgcccatggacctcagataaactccctgtgtgtctcagtcaatagaggatattagcaaatgcttagccaagtgttctggctgcgtttactcccacatccaccaacataaaaagtaaacagcagaataaattgcccatctgctgccatcaatcacaaatacaatcttcgcccactgtaacacaaggcaaatacagtaatgacaaaatccatagctggggaaatgatagagtggtggccaggattttcctctctccacagccccagtccatgttctattatttaaatgcacagggagcaaccacggcgatcaatatgttgcctgccttcgctgtcacaaggcaggctggttgctcgggcctcgaacttagggcctctggatggcatgcttcaggcagctcagttctaggtcagtggaccctgagaggaagaaaagcaaagcccccagtcctcagagatggaagaagtcaccagaaggaacaagacaagaatatgtcacaatggttcagtacctgcacatctatagagtaagtttaaaataaacgtttctggtttcaaaagagataagaatgttcacaaatatggaaaaacccaaggaagaaaatcttaaaaatgtatgattttacctctccccaaatagtcactgttaaaatattgctctatatccttttagacattttctcatcctggtaggcatatgcacacatatatacaaagttgaggtaatgataggtgtccaactgtgctcttcctactctctctgtttggttcactgcagcctctgcctctgggttcaagcgattctcctgcctcagcctcctgagtaggtgggattacaggtgtgcaccaccatgcctggctaatttttgtatttttagtagatacggggtttcacagtgttgatcaggctggtctcgagctcctgacctcgtgatccgcccgccttggcctcccaaagtgctggaattacaggcatgagccaccatgcctggccggttctatcttttaaaaaagcctgctagtttaatagataaaaataatacttcattattctaccttgtgttaagtaattttactaacaatataatcttagtttgtttgctattggctctgtttgacagatgaaaaaaattaagttcagagagaataagttgtcagccagcatcacagaatttctggcaagacggcgcctgtgagggtgaagtgtgcgcttcccggctctaaaatccctgttatgtcagaataattgttaataaaattctttatgaaattgccacatcatggcatttacacatcacacatttgagtttaatgaaagagatttgagcaatgagtttgacaaaaggggaatgtaaatctggccacaagaatatgtctcttttgttcttagtgaaacccttggttgttcaaggaggggcaggccgtgtacatgtgtgcacatgtggatgtgcacacatgcatatatgtgactgtgtgttttagggggtgctggtgtgagctcagagcacaagaaggggtcctgccttttcccactgctcactggtgtttttttgcataattataaaacagagcctgccatgtcacatagggaccgctgctggagcaaccaatatccctgggattgatggcattcattctacagacatttcttaaacagatgtgcttgtcattgaatgaaactatgaacacaataggaatagtctcttccctcactgggcttctgtctagttgaacaaagcagaaagaccagccactgatagatcacgactcatgtacaaccttgggtaatcagtaaaagatcactgatgtggacagatatttacatggaccaaacgcaagtaagccaaacaactatcttaaagtgggtgtctgggcctcattagcatgctgaaactaatcaaatgagtgagaaaataatatatctcctgggttgaattcagcaaggtcttctagggtcaattacaagtacaattagcaaataaactcatagattatttcctgtttacacttcaaacaaacctgactttgctgatttacacggcaggttgcaccttgattataaattattaagtggtcaataatgaatggcattactgttttaatttccccaagtatgtttgaatatcacagcaaagagatgagatcagtcaacacatttgcatatcgtccagaaagacataaagcagaattaaccgtactttggaaatagatggctgaagagaaagctcacccctgagtttacattgcaatcctgataaatctctccccagtaacgctggcaatgaactctgagaggaaggagagatcgggtttgttaaattgcattgagtctccagctctcagatatggatgagtaacaaaagttccatgtatgattcttatcatgtgtgggtcattacagccatccattcacagatgtaagagctgtgctgggaatctggtgtatgacactgaaatccctccagtcagttctcatggagagctggtttcttattgaagatcagcagatcccgaagacactgtggagcctcctggagattcagactcaaggcttctgcccactcacatgtcctcctgctctcccttcagccccctcattccttggaagctcactcccctcctcccacatcccgtctgtccctccatgctgccccagagcactctctgaacaggtgcaccctgctggagtctgagcactgacccagcaaggcaagggctcctcggagagacacaaacggactgagtgaggctggcaggaagccctttcaccccccaattattctggtgcttgctgtttctatcaaagtagctacactgaggaaagagacttgccctgtgtgtgcactccgggggacaggcaggccactgtcacatgcccccatgcttgccctgggcttgttgtgtgcagcaagcactcagtttatttctgttgaatgagtgaatgattgaatgagagcctccactgcagctctgggctctcaggaaactgcggtggcctctgtcctccagacacccctcattcagtgttggttgtcatagccattccagccactcttgaaaaacataattttgaccctcattttatcttcatggggtgcatgtgcaggtttgttacatgggtatatgtgtgatgctggggcttgggacacaaatgatcctgtgacccatgtagtgagcatggtatctaacaggtggttttccatcccttgtccccaccctttctttctctagcagtccctggtgtctggttcccatctttgtgtccacgggtacctgatgcttagcccccactgatacacagctactttcataagcacctcaacttggaagcaacgggatgctgggctcccagtggagggcatgacttaagtttacagaagagattcacttgttgaagggacctgccgtcttctaaatttgaagtccaatttgaaaaactgaagtgctcttagacatgtgcagccttccagtaatttcccgctgagttccactgcacttcccagagtcaggctcctcctctcatcaggcctaagcatttaagcaccaagtgaggaaggaattcaaacagcttcgggacatgtagggaggatgacgagaaaaggaggagtgtgaaatgcctcccaaatatgtaacaacttgccaggtttttccagaaaataagcaattccctctgtcccccagcttctaggtgcaaaaagaaaacagctggatttccaaaatacaaaaggctcctgcctcccagttcccagatttgggcagcagagggatcatatgtccccagctttctccaagatagaggcttagtttggggatgtttcatgtaaatggggactagcgcacccgagacgccaaggaacaggatgggaaatgtacgagtggcaaagaaccctggttctgtgatttactggacatgtgacttgggaaaattgcttcctctctctaagcaattttttttttagttcataagctgtagatatgaatactgatctcttgttgctataaattatctcacatattaaagcacttggcacatggaagtctcccaaagatttcacagtcactctggctcagggtttactcctggaggaaggactttcttcccttcatttgctctcaagtccacttgactcccttggtcccactggcctccctcttgcacctctgcccctgtgcaggccatgagcttcacgagggtgaggaagaaggcgcaggtgtgtctgttcacagccttgccctgcatggcccaatcctggcacatgatggacgctcactgaatacgtattgggcgactgactcaacaaatcctagaggccatcgcagggcacaggcgtcctctctttttttctgcagaactattccacactttatgctgttccttgggcttccttaagcttctggtgatgagatgaaagcttattatatttcaatctattctctttctacctttaaatattggcattttactgtaagaaaagcagactttattttcaattcatataaaattcattttttaaaataaaaaaccctaagaatttaaagaaagagtaatcagccaccaggacttctttgtttttgtgacatgtgcctcccaggcccatgccacgcattcttcaactctctcatctctaacacaactgaaattccgctccccatgtggctgctcttgcagtaaaatgacaattgactgccaactttcctgagtcttcagcttttctcttacattcaacaagataaagaagcattggaccaggggcccagagtctctgagctgctttctcctcacctgtatgtctcctaagccctcataggagcagcttcagtcatggagggcaccatgctcaggttgtccacagctcccaggtcatcagcaaccgtctgtgactctgtgcaaagctgaagggtgacgatccttccaagacagtcaccagaacactgtgtgtgtggggagaaggtggacagaggaaggaagagccctcctggcattcaaggcttctgaccacaacctctccctctgtccagagggggcggggtctccaagccacagggactgcatgctcagataggcagttttgatgatgctgcctcccctactccacagctcctcatccttccttccctccaggcctttcacactggggaagagggtgttttgcttgatgccttttgaagcctgacctcaaagccaagcctcaatccccttcttcaaaaagcctttcctggccttcctgaggcctcccccacacccctcaccacagtgagtttcactgtctgtcagtgaggttgcacgcctatgacacttctgttttcacagtttccctgcacagagcagtgggtaagtcacagaatcagtgtcccatcacttaccggctatggaaccttagccataaaaaaggtcttcatgaacttcagtttccacatcggccaaaaggatgataacacctaacacatggggttcttgtgagggttgaattagaataattcctgtgggcagatggcctctgaaagcgtgcaatgagatttacaaggatgtcaatggcagtattgctttagtttttttttttgtttgtttttttgttttgtttttttgagatggaatcttgctctgtcatccaggctggagtgcagtagtgcgatcttggctcactgcaacctccgcctcctgggttcaagcaattctcctgcctcagcatgctgagtagctggaattacaggcacccgccaccatgcctaatttttttttttttttttgagacggagtctcgttctgtcaccaggctggagtgcagtggcgtgatctcaggtcactgcaacctctgcctcccgagtttaagccattcttctgcctcagcctccctagtacctgggactactggtgtgcgccaccacacccagctaatttttgtatttttagtagagacagcgtttcaccatgttggccaggatggtctcgatctcctgacctcgtgatcctcccgcctcagcctcccaaagtgttgggattacaggtataagccactgtgcccggccaacttttgtatttttaatagagacagggtttcaccatcatgttggccaggctagtctcgagctcttgaccttgtgatccacccacctcggcctcccaaaagtgctgagattacaggcgtgagccaccgtgccagccagtattgtttttaagagccaaaaattcaggaaaactttttaaatgccaccaaaacagaattgattaaatagattttgattacatcccgaagtgaaatattatgcagctattaaaaagaataatcttccttctcagtcttcctcatggtccaaattgaactgcatttcataataggaaacagattgagaagataatcgtagtcttcaagatagacaaacagtagggttttctaaatgtcaaactcactgtgagaaatcctaagctcctatatactatatatgagtgaagcattttgctcagtcatcaactgacaatttttcttctaagaaagaggctgggttggggggctcagtggctcacacctgtaatcccagcagtctgggaggctgaggcaggcagatcacctgaggtcaggagttcgagaccagcctggccaacatgatgaaatcccatctctactaaaaaatacaaaaattagccaggcatggtggcacgcacctgtaatcgcagctactcaggaggctgaggcagaagaatcacttgaacccaagaggcggaggctgcagtgagccgagattgcaccactacactccagcctgggtgacagagtgaaactccatctcaaaaaaaaaaaaaaaaaaaaaaaaaaagaggccagcgcactgtccattggatccatagttctcagactttgtactggatgcttgagaattgctgggatcccctgggaagctgagagaatcccaccataaggctcctcaacttacttacactctgacctcatctgcaaaattccttctgaagcctgttcttttaccttgaaccttggaattgttccataattttcaccctctgtatttcccccaaatgcattcagaggcttctcctcacacaagtgtctgccatttattggtggagcatttgctgtgctctaacagggacttaagataggaataataatgaaagtataggaccagagcctgctgcgttgtgcagagccattcaatgccagcctgccgcagagaggcatcattgtgtctgattgggggaaatgattattttttgccttgtcttccactatcacctatgaaagcctcctagagtgtctttgtcttccccacacacatacctcacacatctgactcactgctcttactatgtttcgggctttgggaactcagtccattcaaattccatataaacactgatgaaccagggcccaagtgagggtggactgtgagtgagaagcctctgatccgggcctctggctctacaggagctcatggagctgaagtggcaatgcctccagctctgctgctggacagacctgaatgcaaatctgaaccctctgccaccctgtttgctcatttacagaatggtgtggtatcacccatctctttggctgcttgtgagaattaagagaaatgaggcgtgtaaagtccctggagcatgggaagtcctcccaagaaagcatttcttgagctgctggaaaaacatctcctaagtctgaaagaacttcgagcagtcaggtggtaaattttgtcagtaaattattacagaataaaagcatatgcgtgtacattgctataaagcatatcagagatttcaattattaaagcttttaaacttctgaaaactgctgcaacattgcaaagaagataaccacaggattggaaactgaacttaaagaacatcatagtcaacatgaaagaacactatttgcatatgatgtttcatataaagtatctcctaacaagggagctaattctaaaattatcttttataatttatcaatgtaaacatatggtgatagaatacataaacagacatttaaaattatgtacaaagcaggaagtcctttctttttttgtacgatcttcaccaatttcagggaatttcagaggacacattaaaatgacattgtatgaacttgcctttaaaattaaattcagaattatgcaaaaccgattgatgtgaagacataaaacctcttagaaaatttgttccacaaaaattatcatctttagttttactaaaaacttttcagaaatgtatcccaatactgtcactcacaatttttaacgactccaataagaactaaatcagccaaaaaaaatcggtttctaaaattaaaattatcaaaaattatttgtgaccttacatttgccaagtgactgacattgctttcaaatatgtcaattggaaattaagttgctaaaagtaaaatttctgatgacctgataaatgaatttgcaaaaatataagcccgagaaatttatcatcaattaaggtattatactgataaattgttatttgttgtattgtatgaattatgacacaaaaatattttcttaattttaaatttatattgttgaatatcatgattaccttaatgtattacaaataacattatttttaaaggataaatctttatattttagtgcctttaactacaatttttctgcttttatattgtgacaaaatacacatagcatacaatgtttcattagtgatattttgtacgttttttcctgctttttgtataagggacccgaaaataatgtagctagtttagcatatcttcacccattgcccacccccttcccctcttcaacctctaatacaaagggccaaggattaaaatttcattgctcttgaatttcaaccaggaagtggaaagtgaaatttctaggtaacaaggacttacgcaagatgtaggtccagtaagtatcggaatcagatgccagccccagagccatgcttgtctagaggagcacacgtcttgttcacagtggggatgagatcgtctgtctgagattgaggctgagttagcagcatctgtagactcctgtgagcaaggctgccaagtttggccctggtgaaccccttggcctctccttcacaaagcctcctgctaccatctgcacatccccaacccctccttcacctagaacagtcctgtccccaggcgttcccttctgctgttagtgaggctgaagctaacattctgagcctctgagggggatgatgacagcagctacgtctttgggtgatgagtgttatggctgcagaggaccttgcgagggcggggctgagtggtttggaagcctatttcctaaggcaccttacacactagggggattccatggtcagagtaattaaggaagggtggataacacggtgcttccgaaggatttgttcacagagcagcacattaaatgtcctgagaaattccagtaagacacccaggccttcccaatcttatctggctgcaaggccttagaactcctaacagttcctgggactagggctccgcagaacaccctttaaaatatatgttttttgttcactgctctaattttaaggatggggagccaagattcagattcaagggaacacacttaagatcataaagtgagatccaagaagataatgcacatttttattccccaattttaggttggtcttttaagagattcaaaggaaggagcctctaatggtgacaatgtaaggctgataattctggagtctctattgtgcgtgtgtatgggctgtgtgtgtatgtgtgtgcatgtgtgtgtatatgttttgtgcgtgtatgtgtgtgtctctgttgtgtgtgcatgtatgggtgtgtgggtgtgtgttggtgtgcatgtgtatattggtatgtatgtgtatgtgttgtgtgtatgtgtatctatctgaatgggtgtgtgtgtctgtgtgttgtgtgtaatgtgcatatgtgcatgggtgtatgtgtgtgtatatgtatgtgtgtgttgtgtgttgtgtgtatgtgtgtatgggtgtgtatgtgtgtatgtgtttacggatgtgtgtatatatgtgtgatgtgtgtggatatgtgtgtggatgtgtgtggtgagtatgagtgtgtacaggtgtatgggtgtgtatatgtatgtatgtgttgatggatatgtgggtgtctatatttgtgtaagtatgtgtttatgtttgtgtgggtgtatgtgtgtgcatgtgagtgtgttgtttatgtgtgtatatgggcatatggatgtgtacatggatgtacgtattgtctataaatgtgtttgtgggtgtgtgtgtatatatatgtgtgcatgtatttgtgtgtgttgggtgtatgggtgtgtgtatgtgtattatgtgtttatgaatgtgtgtgtatgtgcatgtatgggtgtgtgtgtgtgtgtatttggatgagactttatctgtatctctgcggtggtatgggagctggaacccttcctactgagctgccctctctgttccggatttacagcaggactaaacagcaggagaaaccaatgaaaatacagtccactaatgcatccagtctggacggggcagtgaatggaggtcaggaacttctgtggtgccagtcccagctctcaggctttttcagcagctctgaggaggtctcaggcataggttccaaaatcagaagccttcaggaatgagccattctggatagtcatgttttactggtcagtgagaatttgtttcctttaaaatcaaaattcttcaaaatatattaatcattttggaagaaaaatttttcatattttatagtttgcattctttcttgcacagtaaggaaatacactcggacatattttggaggtagttttgaatttttgtttttgctctctcgtgcctgatgcacagaccctcagacactatcagagcctgccttttgggacataaaggtcattttgcccctatactaagcagactgaagtttctacattttacaccactgtaactgctttatatgttttcctggtttccctgtggcgcaagtctgcagtctcattttcgcttcttcctctgcttcccacatcaccatatttaatttcctgccagacctgcatgtgcgagctgcctgatctgggaaagtcatttgatctctcagaaactcctttcctcatggtaaatggtagtagcattgcttgcccaacagtgctgccatgttgagtaagacaccgtgagtgccttagcctcccgccctcttcttccaggctttgctggagccctgctgagggagcctcatgggctggatgctctcgctctctctctccttctctctctctcctatgagtcactcttgtactgttgtgtgatgcttccttctagcaaatcactgtattgctgaataacaccctctatagagctgcaagaaactcttgctttatgatttttttttatttttattttttgagacagagttttgctcttgttgcccaggctggaagtgcaatggcgccatctccgctcactgcaaactccgcctcccgagttcaagcatttctcctgcctcagcctcccgagtagctgggattacaggcacccaccaccatgcccagctaatttttgtatttttagtagagatggggtttcaccgcgttggccaggttggtcttgaactcctgacctcagctcatttgccagcctcggcctcccaaagtgctggtattacaggtgtgagccactgtgcccggcctgttttatcagtttttaaggtcttgcttgattttaaccagttagagaataaggtattttcaattagagaataagagaaaaattctgctgttgctgttgttgctgtttttcctatctgggctcttggtattgggctgcaggggagagaacgttcttggtgtctgtttggctaaaattctattgagtgagatggcagtcatgaggctaatggtgatgattccactcctccctccttcagagcccacgggaagacagcacttccccatccctctttgaagtgtgttgctgcatgtgacatgctttggccagtgaaatgcaagtggaagtgatgtttgttatttccacacccaggttgtaattgcccatgtggtcttccctgactgtgctaatcatggagagatgggtggaagtggtgcctgggctgcccaaatccctgaatggccacaggaatagagttccccgaaagcttgtgtttagacacagagcattagcaagaaatagtcttcttttataataagccactaactttcagggatatttgttactccggcataaccctgtatgccctgactgatacagcaagtaagtaaataacatagttctctcccaagagtctttattagcagcctgtgaagtgcttttttcctctgacttctcatttcctcttcaaggccaggacacctagcaactagtctcaataacccattcattttctttgtggatagctctggaggagaaatctacagccctgcccagctgtgctctctgtttctgaccctgcagccctggtttagactcagtcgaacatttacccattatgttctagacctgtgtgatggtgcatctcccctccccctccatcacattttggagcacatggaagcttttccaagactatttcagcttgccagtttcctgtcagatttttcattgtatatttttctaattaagttaattgaatcgaaaagtctcttcatataaataacagacctctcctttctctcactgcttgatgactttcaactacaaagtcatttttttcctctcttttatttgacttcaggcaccctttgctaaacacttataattgtcctaatataaaagcaatgcaactgatttccacactatgaaaacatttggagactgctgtgtgtgtgtattcatatatttgtaattttttaagctctagcaagagcctcatcttttttcccctaaaatccctttaacattcttagcctagctgagtgaagatagccacaatcctggctcagtatagtcacttgtaattaccttcaggtgcaaaagagttcttaatgcttcaaattctctttccactgtatcaaagtaaatagatgtaatttattattgaaagcgctgctgctatgccgatgtagtgggtgggagttgacatttgggatattgtgtaatgtataatgagtctgaaatgagtggttctgatccagtcagcatcacaggcaatttccctggtaaggaaaaatgcctgcaaattaagttgcatatcttcactaaggcagggaatggcataaactgtggaaatattgattctgattctgcttttcttagaaattgctctggatgtgtattcagaaacatgttttctctgagacagaaccctatattttcagccagaatgatgtttgaaaggcatctttggtaaggactgtttctcagatgctatgaaaatgaaatcaatggggctaatttctccttgtcgctttctatgaatgctgcatgagggattgcagaccagccacaaaatcaggctgaggaccactgttccccgcctgtccttttcctctgcagcccaggctgtgcagagtggctttgcccaaagggagatccaaaggtggggcttgctcagaaatgacaggctgggaagttattttgtggctaagaggaggggagaaaatagctgggaaagagaaatgacatgcatgggctgccaggagaagatggaagagagagccaccacctgtaaaacagcaacattatggaactggaaggcaccaaccacaagatgaagaagtgcgtaaatttacctggaaatcacactgaaacgaggccagttttttacaccacttcaggaactagcaggtgctctgtctctccagcctcactgtctcattctccttcttacccttgctgcctcaattgattgcagaaattacattccagaccatgagtaaaggactcaatgttgctgcccgacgagtcttttctgctttctgacaacactgttggtttgcacagattcacttaaaagtgttaaaaatgtcagacatctgttaaaaatgtcagcagtggttttgctccactcttcccacataccagacaggaaaacagagacaccaggtgccctgcaaacttcccttagggggatgcctgttcttcacaccatggattcaatctttggaacaaaatcaccagctttgtaaggcctcaaggtacatcaattaattacccccaggaagagccatacacagtcagctatcaaagggggatgagacctcaacatactgtgggctgtcgtctgtcacccccagcactgaattcagttcttaccctcgctcacctgtcctgggctcagaggtacatcactgtagaccacagcacctgggatttcttccctctgcttttctgtttgattttaacaatgaggtgcattgtcaggagatgcaagggcagaaagagaaagaagttaaggcatgtcttttccctactccattcctgctttataaccatgtttctggcagtggttaatccttccatgaccacagatcctagatggagcctgatggttctagctctcattaggccccagtaatgccattcctcccctcctgtctttattcctaggggatggagagcttgttgctagtatttggatgtctcagcatctctttttagttttcattatccctacctgtaactctatacactgtccctatattgtagtctcttcattgaaccatctggggtgccttccatttctcaatggtaacatgcagtctaagttcaatagagctaaggagccctgaggctgaagtagccagggaagtctttccaagagagatggagcttgaactgtggcttggaggaattgtacctatctggactctgagtttgtgttttaccatttgcaactgaaccacttggcttaagcagaggaatatttggtttatgtaactaaaaatttaggggcttcaggcatgtctgaatccaggacctcaaatgaaataaatctccttctatttcttagctctctttttattatcattattattgtgtcattccctggcaagttctctctgacacaaaattgactctaggaagctccaggcataattcatcccattagcacagagtctctgaaggaaagagcaatgctatctcttctaacacgcaaggcaacttcttttacagaaccccattggtcttattcaggtcatacccctcttttctcctccccctgcccagaaaaaccagtctccagagaactggggcattctcattggctgatgttttcacacctgtggctaggaagtgagggcctttgggttgagtatgtcctcatgctggaaaagaacaacttcctgaaggaaggaacgtgaaagacaaaaagagtcatcaggctaggtgcagtggctcatgcctgtgataccgacactttgggaggcgggtggatcacttaagcccaggagtttgagaccagcctggccatggccaacatgctgaaaccccatctctactaaaaatacaaaaattagccaggtggcatatacctgtggtcccacctactcaggaggtggaggcgtgagaatcgcttgaacccaggaggtggaggtcgcagtgagccaagatcatgctgctgcacttcagcctgggtggcagaatgagactctgtctcaaaaaaaaaaaaagagtcattgagatccactacagatctcaacatttcacccacctggtctcaaagccagccaaggcccagtgggataatggttaaaaagcctcttccctgaaaatgagctgattctgaacccaaacatgggcctctaagttgaatggtagggtttgtatgagttgtcatgacctggaaaggcactttgctgcatgaatcgcctctgtccctgggactatctctaaaacttctagtccatagacctgcttgacacagaggcccgcaattcaactctgaaggtcaaggaattgaaagtaatggcagaagatcaagcatctcttccacccccatcttttaggatcacccagagaaaagtgttgctaatagcagcctctttgtttctcaaagaccaacaaagcttgtgttagcatatggcctgtacttatggccaaatgcatctcccaagcttctgcatcttatctttattttaataatttttatttttaactgatcatgcagtgacttccagggaagtagactacgacttcctggaacatttgcatttttgtacatttaaattattgttagctttgaaagcagggcaactgccttaggaccacaaagcactctactcaccctactgaaacagatagtggcagtttctgacgaattccacctaaaaattttaagatagaaaatgtgtgtgtgttgtattgtggggcgatggggaaatggggcacagtggcatggatttgagaggctcaagactctatttctaagatgccacagcttcaaagggcacttttctaggtaatcttaggagacagcaggccttagaactctatgtgtgtaactactagttcaacatcttgtttcatgagtttgtgtccaactttgattttttcttagtcaattcaccatcattattgcactcaacgagatcataattccactttgatctattcatggtgtctgtgtttaccttaaggactgaatttttagtggattcttaacttagctgctgtatttaaagactcatcttggctgaattacatcataattctgaggcttctttgtttttccagaactatgaacatttattgccatcatgggatgccttcaccaataggccttgaaattcagaaaaagttaaagaaagatcagagacttggtgccatgtaaaacttgaaattcatgaccttcaggcctggtgcagtaattccagcactttgggggaataaggcaggaagattgcttggtgtcaggagtttgagaccagcctcagcaacacagtgagaccccatctatacaaaaaataaaaataattagtcatagtggtgtgcacctgtagtcccagctacttgggagtctgaagtgagaggattacctgaaccaaggagttcaaagcttcagtgagccaggatcacaccactgtactccagcctgggtgacagagaaacaacctgtcaaaaaaaaaaaaatcatgatcttcagaattcccaaagatgattggggacttgctaagagagatatgatctcaatttgctatgcatcagagacttgccaagggattgctgcacactggctctaggccagccccacaccaagcccttgagagggaaaacaagatactcttagtctatattggacaccaagagctaccaggagctctcattttccttaatcttccctgagctctttgaggcagggcctattgttacttctggtttacaagaagaaaactggggcttggagaggtgaaggaaattgcctgaggctaatgagctgataagtgggaatgtcagaatttgaatccaggctttgtgactcagcatcttgagagcccactactgtatttgactcttcttacaatctagtgtctaaagcaatttgtgaacaaggccatatcttcctagttgatggaatgctgaccataggtgtaaaaagctttgattaaccagagcacttgtcaaatgggctttcctagttaatgaagaccttttgttaagaaaagtgagggggagaaggaggagagcagatagtggtgataagcataatagcttttatggttttaatgtctcccccaaaatttatgctgaaatttaattgtcattgtgacagtattggggtgaattctttaggaggtgattaggtcatgagagcagagccctccagaattgatgaatgctgttatcttgggagtgggttagttattaggaggatgggctcctggtaaaagaagaaagctcagccctcttccctttctcactcctacccttgcttgcctttctgctttccttcaagttgtgatgcagcacaaaggccctcaccaggtgctggtgccatgttcttggactttccagcctctagaaccatgagccaaaaaatgtcttaaaaaaataaattacccactctgtggtattctgttatattaaggcaaaatggactaaaacaatagtcaacctccataaggacctactaggctaaatgatggccctgcagagacgtccacgtcctctgatccccagaacctgtgattgtgttaccttacccaggcaatgaaaactttgctgatttaagttaaggatctcaagatggaaaagcttctctgaattacttaagtggggaagatataatcacaatggccctcataggagggaggcaggaggatcagagtccatgaaggagatgagatgatgctgtgtcacttgctggctttgaagatgggggaaggggtcgtgggccaaggaatgtgggcagcccccagaagacaaccagaggtagggaaacagatcttccctagagcctccagaacaagccagccttgcagacacctcgatgtttgactaatgacatggattttggacctctgacctccataactgtaagataatacctgtgtgttgttttaaagtttgagataatttgttactgcagcaatagaaaccaatacaatgtgctgtatatcagtgcttctaaaccataatgtgcaaagaaatcacccaaggtattgttaaaatgcaagttcctgtacagcaagtctaggtggaacctcggagtcatcatttccaacaagtttccagggttgctgaagatgctgctgtgtaagtcatgctttcagaagcagggctttgcacaataatatctcccttaattgtcataacgactatgaagtagcttttaatttccattttacggttgaggaattgagactgagagtttaaataaatggtctaaggccagaaagatagtacatggcaaagcatggcattgaatccagtttaatcagagttcaaaacctgtgttcttgccaccaacatccaaagaacatgaaaaatgtaaatcagggaaaacaaaacagcaacatcatcattttcacgtggacactggcaaactttctcttctctagggtaaaagtggagaaggtttgggatgtgaatagcagtatttgttggtagcagaaggccatgatatgattcacacgttttcctgctctcagagaaatgatcactccattcacacatgaaaagagcctgaggctcagcacttttaacttacctccaacaaaggcaatgcttagtttttaattgtgtgacttcaaagccaaccattgtgtttgagggattaaattagttatagagaacactgaaggttttttttttttttccactctgcaatgttttgcaatgagaccttttggaattcttcttcggattattaagaaacaatagtacgtacatgggaactcttcagctaaaaagccttccttcctttctttctttctttcttcctttctttcttctttctttctttccttccttccttccttccttccttccttccttccttccttgctttctttctttctctctgtctctctctctctttctttctttctctctctctctttctttttgctaccatctcaggggagctttgctcactgtagttttcactacagtcacatcaaaagttccttgaaagtacagctgcattctcatattcacatcatctatacctgggttttccatacatacaattaaacatgagccatcatttgggtttagaacatgcagtaactgtttctccatgtctttgcagtcttcttttggaaacaccaggttgtgaatctctgcatttgacagcagaagttcacagtttaaaccttggatttgtcactttttcactgagtagccatggccatgaggtttcacttctctgagcctcagtatccccagaggtcatacacagaggagctaaggaccggggagatgtaaaagtgctttgaaagctctaaagcaataaagaagtttgagttaaaactccctctagcgttttgtctgcagtaaagtggcatcaaatgtgtttataaaggttgaccttttcgggccgggcgcagtgactcacgcctgtaatcccagcactttgggaggccaaggcgggcagatcacaaggtcagcagatcgagaccatcctggctaatatggtgaaaccccgtctctacttaaaaaaatacaaaagattagctgggcatggtggcgggtgcatgtagtcccagctacttgggaggctgaggcaggagaattgcttgaacctgggaggcggaggttgcagtgagccgatattgcatcactgcactccagcctgggtgacagagtgagactccatctcagaaaaaaaaaaaaaaaaaaaaaaagggttgaccttttcctgcttgagttagtgaagccccatgaacattcctggttctttctctaacaccagcatttcttactaggttctcagagctcctgatatattagtttttcacagtcctgaattgaaggagaagttgagggcagcattccagaggcaaagttaggtcacccagatttgcatccttgcactgatgttttctaaccatgtgatcattaagaaagtaacatgtgctttgagcctgggtgctgccgtccaccttataaagataatatcagtgccaatcttaccaggctatttacatatagtacttaacaccatggctggcaaagatgacagtcagcaagtggtagttaccaatggtggatcacaacaacgctgacttgattaattgaggtctagctttgtttctgcatctctgttcgatagtttcctcatctggtccacactcagcttccctaggaaaatttaaggtctagcatcttctaaaattctctagcacctcatttgcataaaccaagtttaagaattatttgggcaatgggggaagacacaaaacgcttccttatatttctaccttagtagaactgatgatgacaaacaggaaaacaaccttacttatttattaatgcagaacaaataatcaaaacattgaaaaccaaccttacaggaagtttacaaatgtagaaaagaaataaagagtactctggaaacataggaggtgatgtccttgttcctttgtctgaaacaaaaatgtgctgcctgtctgcaattccctattagcaaaccatgtggagagagatgaccaggtgagttctgactattgacttcctcccattccattgaaaagaaaaacatttaggtttttttgttgatattcacgattggactttttatgcacttgaaacctccccaagggggttaaaaccccaccaacattccatgtctaaagcaaacatttgttcttctatgaagggctctcagaggcatgtttattgtcgaggtcaatatctcctgccctgactttcccttgccaaaacacgtttccaaagcatcagatctgacacttcgttgtagcatttgcagtgtgacagtcctgctgctttcacccatggacagctagcttgctagttttattttgcactttgtctttttttttccaatcaataaagttatatgagtagtgtttaagatgctacagtagatactgaggctgccagatagtacatgctaattaatttttaattatggctttaattttatatgatgccatttaattttattagatgtattaaagtgaagctgtcagatcacaggatctactgcttgggccagggtgagaaatgtcccaggggctgcatgcaggtgtgtgacatcattaagaatgtcgtaagtgggtgtctgctgcaatgtgcatattatgcacataaatgtcacatatgcctgagtggatgaagcggcttcctctcaggcaacctgtgaagttctggaaccactttgctcagtgcagttcaaagactgcctgggacactgagctgcaagctgcaagttagatcctgtgttgccaccgactggccttgtggccttggttaaccatggtattttgctttcctgagcctcagattctccatcagtaaactgatcaccttatgcttttgctttttgaaaaaaataaaaagcaatacactagctatgattgttggcattaacctccctgcccctagaaattgaaaggaaagagggagggagggaaagagggagagagggaaggagggaggaaggaaaggaaggggaatgagctctaagggccggtgtcggtggtttgctccatctcttgggattccctcccctcggcttccgtttgctttatcttccagcagcccaaatgctgccttcaggttagggccactttaccttcaagagcagaggctggaagtgtgtttgtgccacatccacaaattcccaggtgtaatttatatagcagagtcctcctcagcatcaggctgcagctgtaacttctgaagcaccatctttgctgggctcctcttctttgagtccactccccgacttcctatggggtcccccacagcatattttcttagtaaattccctgcatacaaatccttgactcaataaatgtggaaaagtgtgcctaagacagggaaaaagaactgggaagacagatcaggtcacaggccaagagaaacattttttatccaaccacagcaggaaaagcagagacattttacaccaagacttcttcattaattgacatgtttgtgtgtgtgagtgtgtagatgtgcatgtgtgtgctgaatgctgaacactgttctcttattgtagcaggctttaaagctcccaacaaaggaatcaagagggatggaatggcattgagataacatccgactgtctgatgaaatggtgctgtcagagggaatctgtattcctgtgcaagaactgcttgcctggatttccaggactggccacaaaaatgctgcatggagtcaaccattaatcaaacagaaaggactcacctgcatagaaaatagaatatggagcttcctatagtgaaacataaatcaattggtcagagcaatggcataaaattgtattgaatgtgcttcaaaatggcagagaaacgtgcaaggttacatactatcttaatttctaccttgcttcatttccatgaggcagaagcaacacactcttcagacgcatggaatttggaaagactactttcaagagatctttgatagtcctctgtgagcatacttatgtctgcctgagagacatccattcaaggcttgttttgctgccttctttttgctgatctcttttgattcagatggatgattcatgctgtctcctccaggaagtccctgatcttctggatagaatgaatgactctcctgccatgtgccctcccactttgattgcatttttctggaggcaccctgtccttacactattgactgggtacatgtgtgtctcttaaaataaaactcttctcaattcatgcgttcatttaactgacagttaccaaggacactgaatggtaaacatgcagacccttcatccagacacactactctgtcagctgtgtgtccacacaccttccaagcatggggttatcagaggtgaacaaggcactgaggttcctgcctggggaaacctactgaggggagaaagtcagtaaatgaaataattcctgtgggtgataagagccacaacagaaatgaaatagtgatgtgataggaagtggctatgaagaatttaactgcttgacaagttcttcctgcccactgcacccacgaaaccattcaccgagactgtggtgttgcagtaaagaaagcttaatagacgtgaggccagccacacggaagagggagttatcacttaaatcagtctccccgaaggcttgtggaggttagagtttctcaaggatagttcagcgagcaggagagggaagggggaatgttggttggttgggaatgaaatcataggggtttgaaaaacagtcctcatgcactgagttctcctatgggtggggccacaggaccagttgagtcatgagtcgagggtctaggtggagtcagttggttgccaaaactacaaaagtatgaaaacgcatctcaaaaggccaaacttgggtcctgcaatagtgatgttatctacaggagcaactgggtaggtcacaaatgtgactttggaaacaatggctggttattgtttgactatgcctatgtcttagcagaattcagtccctcataatcctaatcttgtgggcttttatttttttaaaggtggcttcgttttaagaaaggttattatcatccttgttttaaactatcaactacattctttccatggttagcctggcctatgcccaggaatgagcgaggacaggctgcagatgagaagcaagatggagtcagccatactgtttctctgatggtcatattctttgcagaggtggttacaggaactggggttcaggaacagttcaaggaggggacattttagctgagaatgaggcagccatgagaagggggtgcaggggagagtgagccagggagagggaaaaagaattgaaacttcctggaacaggggaggaacagtatggctgaggcctgggggcagggtgaaagtaaccaggaagtaaggtcaggagggtgggcaggggtcagcctggcaggaccttgtgtccctggggaggagcttagcttgctggtgccaaatgaccaggctggacatcttttttgtgtcctttgcatgatctgtccttgagagatgaccagaaaggtgtgaccaagtacctggatagtttcaagtgctgtaagttaacaggtgaggacagatcagagcgtaggctaccccttcaagctggcaacattcccttgactaaagctttcagcggagacctatgatttccacagtcagaagacacgctagacgaagggcgtccatccagtctcagcccagagtgtatagcctcctcgcaaggctctcactccaggtcacactctccagactcatatcctagcctgaattttttttttccgttgcttcaactcagaagtagcgactgcatcttgctggctcctatgccaggtgtgcagcaaacactaaatcaggaggtgcagactcacatgctgtgtgggaccaggtgagtggcatggacgagcaggacctgagcatctgggaggaagaccctggcagcaggaggaagcttgccgacaactcggacatgtcaacccagcactggcaaaacttctgacttctcatagaagctggaaatccatgtgattacataagttccttggattcgtaaatattgataattagttcacattcttaacactgtgtgtgttgaatatgtctatttgccaaatagtaagaagaacaaacatagtagtaagaaagtgccaggcgttcttggaagcatttccacatatagcaacctaaataaccctgacaactctccgaggaggcaccaagagtgcctggcactttttaataactctgttttcatgttactctgctgttacttagggcataacattttcactagactttctggagaatatagtcaattatgaatgctccaacgctctgcatcactatctagacaaactgaatgccatttcacatgtgcactagtctgcatggagaagtactaaaattttaagcttggacttgtgttcctaatttcctatttctagtgcattaagagatgatgggcattttaattttccaaaagcaatgctagtattcagcggcaacatgctacgtctaccacacagtacagtgaatagcagaactacaaaggtgggaggtgtaagtgaattcctattggaccttcccaataagttgtcttttttgtgccctgggcacttctcttgcctcaccttagcatctcctcttctgtaggaaacaaccctgcaaggtagaaatgattatgctcatttgctgatgagaggatgagctttggagagtggcttagctcacccaaagacacaaaattaggttcccagtcctatgaccctatccactgtacaacccttttgagatgtctttttagacgtttgcaattttggcaaccaactgaccctaccacccacacctcagactcatgactcagctggtcctgtggccccacccagaggtgaactcagtgcatgaggattgtttttcacacccctatgatttcattttcaaccaatcaacattcctccttccctcctctgctcatcgaactagtcttgaaaaactctaacctccacaagccttcagggagactgatttaagtgataactctctcttccatgtggctggcctcatgtctattaagctgtttttactgcaacaccatggtcttggtgaatggtttcgtcagtgcactgggcaggaaaaacttttcaagaagttgtcaaacttaaatagtagcaaatgagtgaataaggaaattccctgctgtcatacacataacctccataacatgtgacctaggacacattttctagatggggaaactgaagtacagagagattaaggaatttgcctcagccattcagtgaggcagtgagatcctgggatttgaggaagctatgtagctctagaagcctgctctttggggctaaactgtctgcaggttcagtgtggacagcctctgcctagagtgcatggcacccgtgtggcaggaaatcagccaaaaaaccagagctgcatgagcctgggccagaagcctcatgagtggagaggggccttggacactcaggtcttctcagggcccagaaagacaggtacatcacacaggcttccctgccagagtctgaactcctcaaagcaaacacctactttctacaattgccagggcagtgccccattcacgtggcatctgtgctgtttcggcaaggcaacatgaggccatcatgagctccatcatgcacctgcagaatgaccttgggttgtacagtggttagggacgtagggctgggaggctaactccaggctctgcgacctttgtgtccttggataaactaagccactctccaaagctcatttcctcattagtaaatgagtataatcatatctaccttgcagggatgttttctggaaggggagatgctaaggtgaggcaagagaggtgcctggggcacaaaaactgacagtagccagccctgcacttgcaggagcctaagagtgagggtctccttacatttcacacccagggcagcactcttgccttacctcagcaggccctgaaagtggtggatgatgcaggtggagggtacttggcatggtgcatggcgcacaatgggaacctgcaaagggcattcccaaccccctgggaagccctgagcctcctgcctcatgaaccaggccagaccgtcatcaggcactgtgagtgcctggagttgatggcagccatggctcctttcacagtgcgctgccggctctggggatgctgtttggctgtgtccttcagcctgaaaaatagctctgagtgataagccctcctgcccgatttcttgcagttgacaaacaatgctgccttgaaaacagctaatttcgaaaggagagaattatacagggatgtgtttcctccctcagagcattctgggaaaagccatggcaccactgcttacctaacaggttgaggcaacagggaatacaggtggggggcttgggggaatggctgtgatcagtgctgccaattcccagctgccgggctgcactccaccccaaactgcacacccagtacgtggtgctgtgccccagagaaagtgcccacataacaccacagacacctttccccatccatttggcccatatctctggagtgtgagctctgcgtcaggcagtgggctaggcgcagaaacagaatggtacggccctcgtccctgggcagctcacagacgagacaggcacttaaatcaaggcagcacatgattcactgctatgagggagagacagacaggtgcgtcacacaggctctcccctgcaagagtctaaactcctcaaagcaaacacctactctctacatctgtgcatgagtaacgagagctgagggcacaatagacggccaacaaaaatctgtcaattaaaaatgcagtgagcaacaatgcaagggactccaaatttagaaaccacaatgcaaacagtcaccagataaagaatcatttataaaaagaacctttacaagtttcaagtacttgagatgtggtccctgtaaatccccaccaccctcacatggtgtttaaaaacaaaagagatactggtggcatccacagccttccagagcctggaaactgggaaataaagttgcccttcctggtggggagtcaaggccatggtgagatttagtgaaaattcatacaaattgtcttgctgtgagacaaggaattagcccttctggggagagctgtgcctccttaagggctttaaaacaaaaacaaaaaactggggtcagaatagtggtagcaaccaagacactctggaggtgactgtggctccaaagcacggcggggagaccagcgggtggggaatgaccttctggctgggttgggtccaagcctgcttatttcctaggactccgtgcaggtcattccagctacgagctttgggcacatttccaaagctgatatctttgtggcggcttgggaaagaggccaggctcttgggcctcctctgccaaaacaaggttgtaaaatgagtctgctggtttcatactgggatgagaagaggagcgtgcaggacgtaaaaaaaaaaaacaaaaaaaaattaaaactctgaagaacgttgaagaattgagcaattacaaacatacgaatggatgcattaggaatgacagtcataattattccctgaatttatacaacctagaccactttgcatttcacacatattatctcattaattctcattttaatagtttaaaattgagtttgtgtgcatgtgagttttcctggaagcttcataaccatggtgggtgattttcacaggaccacggaagcctttgcagaggttttataaagattagtcctaattcatgaagcaaacaaacatcacagagggaaaaacattaacctactgctccctgtccccagaaatccatgttgcccctcggggttcccgcaggctctgcttggacttgccttccccaagaccccaactcccatgccagggctgtgcatctgcttctcacatcctcaggaaccccagcaagacccacgccttgtcatttatttctgagcctctgtggcctagtccaatgctcgttaaatctacacattaataggtaataagtgagtgaacacaaatgtgatgaatgctgtggtgagtgaacactaatgtaatgaatgctgtggtataagtgagtggacactaacattgtgaatgctgtggtgtaacaagaaatctacttgtgatctttttccagttcttgtcttagagctcctaagacccttgaaaatttctgagtgataggtgcatcttttctttttcataatcagcccctttccatgacacctgaatttatgctaatgaaggacttctagggcccctagatcttctcaggatggggctggtccccagataggccaaatgagttgaactctcagccccttgaagacctctgggaaggagtagggggcaggctggaaactaggctctgtaaaaactcttcagcaacaagatttgatgaacttctgggttgctgaacccttggaggtgctgagaggggggcacacccagaaagggcatggaggctccaccccaaaccttaccttgtgactctcctcctctggctgtccatctgtgtccatgatgacatcctttataataaaatggtaaacatgcttccgtgagttctgtgagccatcctagcaaattaagcaaacccaagggagtggtgggaatcccaacttacagctgatgggtcagacgcatagatggcaacttactacttgtaattggtatctgaagtgggggcagccttctgagactgagcccttagactgtgggatctgagtctaactccaggtagaaggagtcagcatagaattaaaatacaggacacccagttggtgtctgctggagaattgctcggtgtgtgggaggacacccatgcatctggccaccgaagtggtctgcattgagtgtgagagtagaggaaaagagaactttgatttttccttgacaaatgcccttgccatattttcttcgttaggcagttttttttacctttgaggtgcttaagccacacagtctcagctagaatgtctcctgagaggactaaccttgtgtcacgctttcccgtctggctctttctgcatttgataaagtgactgacggatgctaggtgctcaataaacatctgttaagttaactctgactttctcgtggttggaacagctatcatcagagcacaccaagagacaggtttaggagcctccatcctcttgtatacgtaagaggatctgagtggaggttccccagaagcagatctggagatgaagatttgagggcaagtagtttatttagatgaaattaggaagaaaagggaaaaccaccagtcaggtgcagctatggagccagccaccaccatgggcgggtggagctgaatcccgtggggaactctgggagggcacacagagttttcccagttgacgggccagcgagctggggtatttctccactggcccctgtaggtcatttttaggctactcctaagggtgctgattctcaatcacttcaaacctggtagcatcctaacagccagagaaaggcttcaggccaaagaacgcaggtcctggctgttggaagtcagagcagagagcaccggaatgaggagtcctgtgggaagacgggaggactctggtggcatctgctacaaccaccctttaactaggacccacgtggtgcatggggcccagaccttgactgtgagtccaggactccacctctgggtaagagctctcaggattttgcctctctctttcctgccccaggacaagcaggggactcctcatctctctctggctccagagcttcatggcaggagtaaaaactgtctgccagggccctgtggtagaaaggggaataccagctcaggatacaggggtcctgcttatgccttagtcctgcctctaatgagctgtatggctggatcaatggctcaccctccctgggtagagactgaaggcagttggtctggttcataagagcccttcctttttgccctggtcctgggcagcagactgtatggttcccctctctggatggccgtctttctccatagatattctgtattatcattattattaatgaggcaaggtcttgctctgttgctcaggctggagtgcagtggtgtgatcacttgaggtcaggagtttgagaccagcctggccaacatggcaaaaccccgtctgtactaaaaatgcaaaaattagccaggcatggtggcacatgcctgtagtcccagctactcgggaggctgaggcaggagaatggcttcatcccagggggcggaggttgcagtgagccaagattatgccactgcactccagcctgggcaataaagtaagactccgttcaaaagcaaattacccagtctcagttatttctttatagcaacaggagaacaaactaatacctttaggttttaagataagctgaaaataaaataactcaagtgggattcaaggtggtctttggaaactaaagacagaaataccactcgacccagcaatcccgccactgggtatatacccaaagggaaatgattcattttatcaaaaagacacatgcattcatgtgttcactgaagcactgttcacaataacaaagacatggaatcaatctatggtaaactggataaagacagtgtgggacatatatgccgtgaaatactatgcagccataaaaaagaatgagattatgtcctctgctgtaacatggatggagatggatgccattatcctaagcgaattaacacagaaacagaaaaccaaatatcacatattttcacttataagtgggagctaaacattgggcccacatggtcataaagatgagagcaacagacactgggaactactagatggggcaggaagagagggggctgaaaaatcatccactgggtactatgctcactatgtgggtgatgggatcatttgtggcgcaaacctcagcatcgtgtagtatacccatgtaacaaacctgcacctgcgccccttaatctaaaataaaagttgaaattctttttcttaaattaaaaattaaataaaatggtctttggcatttggggcctattatattagtttttaataatttttttttgtatccctagtttcttaaaccaaaaaatagagatctatgtgctggttgccaaaatactgttaaacacaaggataaaccaatttaaaggaacatttaaccacttaaagccagaaaccgtcctagattaaaacagcaggaggaagggaaatctgatctgcatacttaagtgaggggccttgacctgccctttctaaagcaccacttccccctgtccccaccacacctcactctcagggactttttcctacaattatttggtggcctcctctctcttcatgaaatgctccctcccttaatatctcaggtcctggctcgggtaacagcttgtcagtgaagcgtttcctgacaagtgcatataaaacacacacacacacacgcatgcactcacaggcgctcactcacacatgcactctctcacacatacacactcaacacacacagatacatgcacactcacacacacatacacactcaacacagtcatacacagaaatgcacaagcacacacacacgcacactgtctctctctctcacacacacacttacacacgtgcactgcgttccctgcctgcgtcatggttttccatggtctttgtttggttcctctccccgcaggctacacactccatatggcccagtctcaggaatccagaacactccggcacccaaagatgatctttattattgttgctggagaatgggtgtctcaagccaggagacggggactcactcttttctctatggggaaccctggaaccctggaaacacaccattctctgtgaggggaggtatggggacctgcccttttctgtgagggggaccccaaggacacgacctcctctatgtaggaagccctgagaactcactattatcagtgaggggaaccctggggacaagccctgttctgtgaggtaagacctgtggacctgctctttactgtgaggggaaccactgggacctgcccttctctgtgaaggcagtctcagagacccaaacttttctgtgatgggagccctagggacctgacctcctccgtgaaggaagccctaaggacacgccctttactgtgaggggaaccctggggacctgcccttctctgtgaggggagcccccagatcggccttctttagtaagggaagccctagggatccaccatcctctgtgaggggaattgaaacctgccctcatctgtgagggaaactctgaggacctgccctcctctatcaggggagccctgaggacccacgcttttgtctaaggggaaccccaaagactcgacctcttctgtgaagaaaggatccaccattttcagtgaggggaaccctggagaccagccctcttctgtgaggaaggacctggggacccaccctttactgggaaaagaaccctgaggacccacctgcctctgtcaggggagccctggggacctgctctacgttgtgagtggaaccctgagaacccaccctcctctgtgatgggagccgtggggacccaccagtttctgtgaggggaaccccaaggacctgacctcctctgtgaagaatccctaaggacccaccattttctgtgagagggaccccagggacaagctctcttttgtgaggaaagacctggagacccacccttttctctgagggaaaccctggggaccctccctgcttgtgtgaggaaccccagaagttcaccctcctctgtgaggggagccctgggtacccgcccttctctgtcaggggctcctagggacctgctgtcctctgtgagggaaaccccaggacctgtccttttctgttaagggaaccccgaggacccaccttttctgtgaagggaaccccgaggacccgccctcctctgtgaggggagccccgatgacccgcccttttctgtgaagggaacttgggaacacgccctcatctgtgattgcctctgcctggcaatgagcttctatagaagggcaactcctctttgcccttcctcatgacgtggccctcctggtgaggagccttttttaggatttaccctggtcttctgcatggccctttctatcttgtccttcccctgggcagcccctcctcagtgactcgatgtcccccttgaactttcctgtcagagtctgcaggggtcacagaaggggtggacgctatcctgcctaaggccaggaccatgaccctcgagtccaggagtcttacggctgacagtggggtcaagcaggggaggcgggggagcacctgaggcttggaccttcccttcatggagttgttaaaactgcatggggacttcaggtgacaaatccaggaagcagcaaccgtcattcagagccagcagttggcacgctaaagaaatctaaagaaatcctggggtctctgggtggtctggtatggattacctctgaagccccgctctttctgtgttggtcctgtttaaacctccacactgaaactcgtttttgctctgaccattatcaatatggaacacaggtgtgggctgagctgggcgggttgatgagagctgaggggaggacatgctgacattagaaaagtctctgagattagaacaagcccctggtccaccaggaaaggaaacagcaatgccagaaaggcaggagaatctggattcggagaggacctatgtcagtttctagatctggatttggggaggacctatgccaatttccaggtggacataatgaaaactgcagggtccgcttctacatccctggtgttggatctccacaaaacctagaacagtggcctggaacactgggatggttgtagtccctcagagtttaggctggccggaactgcacacacaaaattgtcaatcgtcactcccaactcaggactggcaggcacaacagtctccattgcccaggacagtgcagacaccacagtcccacacagcccaggacagtgcatacgccacagttccccatggcccaggacggtgccgacaccacagtcccacgaggcccaggacggtgcggatgccacagtcccacacggcccagatggtgcacacatacccttcccttattctccaggaatgggcagaccccacagcacctcacagtccaggcctatgcacacgctacattccccacagcccaggtctgtgcagatgctgcctcccctcatagctaggaccaggcagacgtgggagtacctcgcactttatgagtgggcagacattgtagtgtcttccaactcaagactagggccagagggataaggaagtggctgaaagaggccttgtgatcagaactgcgagcattcagagtgtgtacataatggctgaagatcagtcagaaccccgtagctctgcagatgtcagtgtggacagaggatgcccaaaggataaatttttttcttcccaagactaatatttaaaagtcacatgagtcttgcaaaattaaataacactctaggaaaaatttctggattcattgtatctggaattaattatgatgatcatttttgcaaagattgttatagaaaaaatagatttttatccttgtgcacatttggattttaagaaattagaagagccagtcttcaacatcgtcctgggctccataatccccttgcatccatgttggaagttcccactgggagcacacggggaagggtgccctgaatgtgcctttctgccacctgctctggggactgtccccattgccagggaactttgggttctttacccctccataggcaaaggagaaccttacacagaaatcagccttctgtcctcacacagtagcctcatcacagggcttccaggggccctcaggcaggtgggtgctgaagtttccccctagatgatcagcagcctgcttccacccgaaatccagtccccctggctgcctgtgacaagagagcccttcatgctgagtgctgctctcatcgcacctttttctctccgtgtttagacagagagagtggattcatgtttgattaaacagtgtgggcccaggaaaatcaattagcaagcaaagtgatccacagtaatcaggatcagtgccatctactaagctcccacgatgtgcgaggtcccatataagggcctcactgtatcatctcccttaatcttaatgagatgagatagatagtattatctttctcactttaccaatgagtgagagggcagagagaggttaatgcagaattgctaagtatctgatcaggatttgaaagcaggggtttgcaattctgtagaccttgcactacacttgtggggcagagccaggcatccctcacatcttggtgacctcagggagttgccaggattggagtccaagacccacccttgttggggttggggggcagcttgtgagcagcctggaatgagccccatgattgatcgctgcaccttccttcccacaagtgggtaatttggtctccttctttgttgcagtttttgcttttgttttttaatttgaaataacaccatccagttggcaaagcctgtggggagaaccattttattactttttctaaatataacgggaaaaagttgctgacccagagctctgtggcaggaacaaattgtgcaagttctgttaagaagaggatagatgtgcacctgggactgcagagaggggctcccaggatgggcttctgccagaggctgatgtccacattgtgttctcttccaacgcaatcatcacgttagacgaagcatgagaatttttcatcagctgtgtttaaacttgatgatgctacttgcaaaggaggggctttgagtcccaactcaagtcatacttcctctgggaagcattcctggagtttcatctgcccaagcaccagcattctgcattcagaggttcagtatacactgtctcacactggcgctgtctttagtatctaactgtctctccaggttgttttcctgggaggcagaaactggctctcaccttcttttgcccacactgtcagcacctagaagtgcctggcatgtttcagccctcagcagtcacttgtttggtaacagtcacctgaatgtcaaatcttgctctgtaaatgagaacagtaatacatatacaccctttagggctgttgggaggacgagggacaaagcataaaaagcatttatcactttgcctgtatgtagtaggcaattaattagtgttgactattataatgtgtttcagaaatgaatagctgcaaacagagctcaagttgtcatccctgtgggagtgggattatgtctcctggaactctatggaggtcagtctcctgtgtcatcatttaactttcttatcgatctgaatccacccgccgatgagaccttctggtgatgctgccctggaaggtgtaattaaaattaaagcaaaaccaaagaaatacattagaaaggagagaagcaagggctgggagtgacagggaggcaggttggaaatgcaaacgaggctgtgctaaaatagtctccacggctgggagaaggaagaaaccatccagaatctaagggttttctaagaaacggtaatggcaatgaggagggccgctggggaggactcacagatctaggtgaaccaggtctgtcgggagcatttgccgtgtctagtggcccaactcactcatagtatagaaggcaggagggggtggaagagatggaggggatggcaggagatcccagaagaggtgagtgtgttgtgtttttctatcttcaaggtcaaacatatggtctcccagaaaaccaacaccaactccaagcttagtccacacgctccaggtaggctctggggccctctggttcaaggcgcctggagcaatcagcccttcagatacccctggagatggtgattacttcatggcacatcttgtaacccaagccggtcccatgagaatgtccccaggatgagcacaggtgctactgagagcaatgactttttcccagtggactggatgctggggggatggggagatggtgcctttttaaatcctttatccaaaagctgaagcccgagacctaggctgggaagccgggtcaagagatagacatgaagctccagtgacttttttttctgagtccctggatcaaaccacacctgaaagtcacatatgtgtttggttttctagttttatgaagcagtaaatctgctttgttcttgaccagtttgtggtgaatttactttggacactaagcgttctgaggccccaggccccaggagggatacagtagattggttcacccgacatctgttctagtcctttctagtgggtgttcctttactgcaggggtgggggaagcaaaactccaactccaaggcccctcccagctagggctctgtatctgattgaggttccaccaaccaggtgtcctatgagacttgacttgcggccaagttgcatgaaagaggggaggcagccgtttcgctggtgtgtttgcagcaggtgcagaggcgctgcttgatccccgtatcactgccaagctggtggaacctggagctagtgcttaggataagacatgacgattcacctcctgtgtgattatagcaaaagcagcatgcagttttccggatgggccagttctgcggtgaggtcctgggtcccagtcctacagagcctgcccctgcaggccttccaggggttttggaagcgcctcatttccagtattcgcccccttttcttgaaatagctggagtggtttctgattcctgcatcagtatcctgactgatacagcagcaattctgcctttggacacggtgtttgctttccgtagtcaggcgttagcacgtcaggctcccccgaccttgggcgtcttactgcctccaggtggcaggaggctagtgactgctccctgaacccccagaagtatagatggaccatatttgtgatgtggttcccagctgacccagatttggagtggaggaaggagagatgaggaatggaggtgggtgcaaaaggataaattgactgaacttgaaaagagaaaatgctgccattagcatgggccattctccccgtgtgcctcctcggggtttgtgaagaacaggaattaagtcgttctgagcagcctccacagagttatcctaaaggcagatatacccggggttctttggccatggtgcatgcctgtcccactccagaggaggaagacagcaggctggaggtgggtttgggttgtttctcaggaatcacaatttgggatccctggtacaaagccaacttccttacgatttcacactgagtgattggcaccacccatgcccatatcaaacagctaaaaacacagccccaggtatgttccagctttctgggtcttctcagatatatgggttgttcctgagatcaaggacagggcactgtgttctctcagtgtagttgggcccctatatttgacacttcttttacatttgatttcaagctccaaataaaatcccctacatataaaggttctgcagattcactgactggatgccctcttgacttcctgctagcgtgccttactgtacagtaggacaatggtctctgagagtgggctttgaaacagcaggctcagcatcaccacggaacttgttaaaaatgcaaatataggctgggcgcggtggctcacacctgtaatcccagcactttgggaggctgaggtgggcagatcacaaggtcaggagatcgagaccatcctcactaacatggtgaaactccatctctactaaaaatacaaaaaaaattaggcaggcatggtggtgagcacctgtagtcccagctacttgggaggctgaggcaggagactggcgtgaacccgggaggcagagcttgcagtgagccaagattgcaccactgcactccagcctggctgacagagcaagactccgtctcaaaaaataaaataaaataaaataaaaataaataaataaataagcaaacatatggccaggtgtggtggcttattcctgtaatcccagcactttggaaggtcgaggcaggtgggccatttgaggccagaagtttgagaccagcctgggcaacatggaaaattcccatctctacacaaaaatttaaaaataagccgggtgtggtggtgggcacctgcagtcccaactcctcgggagaatcacttgagcctgggaggcagaggttgcagtgagccgagatcatgccactgcactctagcctgggtgacaaagtgagaccttgtctcaaaaaaaaaaaaaaaagaaaagaaaagaacacaagcctcaccccaaaccttatgaaatgttagctttctcacagggttattgcagtgattaaattgaaacaagatgtgtaacacatctagccaagaatctgcagttacagggctgacactctttgggtctgtgtgtaagggtgcatgtgtgtgtgtatgtacgtgtgtgtgtgcatgtatttgcacacgtgggttagtgtctgtgtgtgtgtatgtgtgtgcatgcgtgtgtatttgtgtgtgcacttatgtatgtgtgtgtatttaggtcactgcgcacaccctcagctctgtctgcgatggctctctttgtccatgatggacctgtattcatctttcagagttttactcaagcatcctttggtctatttgcctgtgagctcttgtcttgtcttactccccccgcttgtactagcccctctcccagagcttcctccctatccacattccttgtttgcatgagtagagtaatccctgtggctagtctgggacccattcacccttctcctgctcatggcatcctggttttattttgggaaattttgtgccacccagtcctaatccgtgtggtgtggtgggattgatcctacagcatattgtctgggctgaccaatcttattctacttcaaggccacagtgattgattcacaagtgagcacgggacatacgtgggtccaaggcgggtaggtctctagatctgggcttgaaatattggcccatttttggttgggatgggagaaatcctgcccaagcacaaagccaactttgagtaaagcagaaggaggcaatggagaccaactcccggctctgaatgcctgaatctgtcagtgaccaccttttagaccctgtgagtgtgtagctgtgtgaattaaccaagacctctttttgtaaattttaggggattttgttcttgtgttgttttcccaagtcactgtgattgtggttttttccccttgaaaaagaacgagttgggtttcgtgaccctgttaagggacctggtcttacaaatgcctggttcctgcaaagtcctcggtctatggtagacccccaggaagtgctgaatgatggaatgaatgtctaccaaaagagaagggctgagatcttttccttcagccttttcttcacctcttcagcatgcattcatgcggcactgcccatgctccaggcttctctccactgtgcaatttgcctggctgacaaattcccctgaccacctcaacctgcacagtatctgtgagatctcaggggatgagcagaaatgtctgcacccaaaggccaagtaaggcccctccacaaccctctgggctgaaagttgttgagttcagatggctgtgccatgcagctgtctgctaaccatgccccatagagtggagcagacacttgtaaaaacgtccctctgaaactggctctgtatggccccagcaggaattaatttgctattgtaaatgagattaaccagcctgtcttccaaaactcatttgtccatcagatggtgaggtgactggtggccaacctactgggggatgttttggagaggggggagctctccacagaaaacggccttctctgcccttaacttctttttgaattaggattcctcttccacacagcaaatgttggctcaagcttttgggcagctgcaggactgcagttagttaggggtaggaggcccacctgggatgggcttctggcagctctctgaagggtggagaacatgacctggatgttcctgcctgaggaaggaaccatggccacagactgggccctttttcctgctgctggtcaggggacttagaagccctccccgagtctctggaaatcttggatctgaactccaggctctgggcttctaagccgtgcctcccgctcccctgtcacctggtgaggaatatgggatgagggagaagacagggtgaggctggcacaacggggagagggtcggaggaaaggatgccagtgatgtgcttcagaccttttctaaaaccacaggttgaattgttgatttctggtcaggtgtggtggctcaagtctataattctagcattttgataggccaaggagggaggatcacttgaaatcaagagtttgagaccaacctaggcaacatggtgagacccaatctctatttaacaataaaaataaaaataaaaaactaaagtgttaatttccaaagccatgtgtctgtctccttagaaaacctctcaaactcactggagcaaacagcacctgtagactcagcgcgggagcgcctcttccctctacagctccacagacatcactgcactcccagcagcacaggcaggagcctgcaccaggaaaagctcagggatgtgctggcccactcctctcctctgacccttgaggacccaggtctaggggggattaagaaatatgccataggaaaaataaatgcaagagctgaatggaactagaatctctgtcgctggactcctagctcagtccctttcaagctgttatttaggattatcatcggactgccctgggcctccaattttcaggagtttttcaccccacccagagttttaaggcactcattgtgaattacacaaatcatggatgtagccctgctagcgctaagcaataagttgtcctgcatcgccccctggtgggcttttgagctatagtcatattaaatatattaaatttctaggaaggactgaagtggctggaccctacctctgtgataccttaattcctccaagactgtaagacggtcggctccatccacgcactccctctctcccacctgtgtggagcgcccttctcttttctcaaactggatttgattattatcccaatcctagttgcctttctcaggcactcagttctctttcactgaagctctcagcagagtgtggatctaggtgcactgtgcttctattggtttccaccttagctgggctgccttctggaaacaagaacttggctgttttaaaaaaatacatatatatatatatatatatatatatatatatatatatacacacacacatacacacatatacatatacatacatacatatatatatacatatatatatacatatacatacatacacacacatatatacaagcatgcggtgtataataatcccatcagggtaagtggggtgtccatcacctcaagcatttacctttcattgtgttataagcaaaatactcttagttattttgaaatgtacaataaatgattgttaactgtagtcaccctgttgtgctatcaaatactagattttattccttctatgtttttatacccattaaccatgcacactctcccctcccccaacccttcccagcccctgtaaccatccttctgctctctatctctgtgaattcaattgttttacatttttagccccaacaaataagtgagagcaggcaaagtttatctttctgtgcctggcttatttcactcaacataatgacctccagttccatccatgtggttgcaaatgacagaatctcattctttttaatggctgagtagtaagcactccattgtgtacatggaccacatgttttttatccattcatctgttggtggacaggttgtttccaagtctgggctattgtgaacagtgctgcaataaaaataggagtgcagagatctcatcaatagcctgattttctttctttggggtctatgcccagcagtgggattgctggatcacatggtagctctatttttagctttttgaggaacctccaaactgttctccatactggttgtaagtttgttgttttaaccttatcactggatacttagcactgggcacagtgctagggcgtagataagacactcaaatatttcttcaagggagggagcaaggaagacaaggaggccagaacacttgccttggacatccttgaaccctcaccacacatgatgtacagcctggaagaatagcattaaatcatggatggacaagcagatggatgaagaaatgactttctcctggggctccctcctgtcaaactcccacttctaatctccagtggcacaggcccctgtcctgccctagcgcctgtccaggtctaaagtggcaatcctgggaccccattgcctgcagtttcctgatgtgttttttgcatatatttttaaagacaacggaacccagagattgggtatcctattttttggtttaaaactgtcagagatgtttgaaccagagtgactccatcttgaataggggctggataaaaatggaaactgagatccgctggcctgttcccgggaggtcaggcattcttagccacatgaggtttatggttaaaggaatagttgaattcatgttgaccaaacagacccaagacttaaccgacccaggaaatgtcctaatgtcccgatatcttaagaacaaaagcattcttagtttaagaataagtttcgctttaaagatgcagattcttgtgaagatggtagttacacaaagattagcactcctttgacacagccctggtagtggagcacatcccccacagcttttgctttgttattctatatataatcaagcatttcagctaagatggatgcgttcctcctcttgcctttgggagcgccctgctgtgtctacgaagtagcccttgctttattcctatactttcttaataaactggcttttgctttactctgtggacttgcccccatttttttcttgtgcaagatccaagagccctctcttggggtctggattgaaacccctttccagtaacaaaaccacagtggccctgattttcttagagagagttcctgagagttcataagaaaagatttgagttctgattgtatccagatcaaccagcctgacctggacatgttgacaattgtcggtgccattacaggaaagtctccatccaggagaggtgggggacagggccggtgcccatttgccttctaagcaaatgcgtcagagactgttctaatagggaaagaaagtataactaatgaaattaaattcagggaaagaagatgagctctactaatgattaatgttcaacttaatagatcagcaagacatgctgagttgagaagctgcccagagggttccagcccactgcccaagcacaggaggaacaatgagaggagcgacttccgctccccgcacccgcggcttgtctctggggaaacacagttattaattgctctaaaatgtcagtcactttgcttcaaagtagccacttccccggctgctttctgatctcccccttgaaaatgacttccagtgtggacattgactctagcttgtgtttaaaacagaatttggggctgggcttagtggcttatgcctgtaatcccagcactttggaaggccaaggtggccgggtcacctgaggtcaggagttcgagaccagcctggccaacatggtaaaacctcatctctactaaaaatacaaaaattagctggacatggtagtaagcacctgtaatcccagctactcaggaggctgaggcagaagaatcggttgaacccagcaggtggaggtggcaatgaaccaagatcacgccactgcactccagcctgggtgacagagcgagactctgtctcaagaaacgaatttgggggctacctaacctatcaatgcactaggcttttacatctttttttcttttaaagacaagagtcccactctgtggcccagactggagtgcagtggtgcaatcatgactcaccacagcctccatttcttggactcaagtgatcctcctgcctcagcctcccaagtagctgggaccacaggcccaacaccatgcctacctgaaacaagctttttacaaagtgacaaatcagctcagttcaatacatgtgggtgggatcctgctgttctgctgccctgcccctgtggctgcaacctcagaaggcaaatacccacagggaacagacgcgcccagaacagtgtgaggcagggtccgcgggggcttccaaagaagaagacagagagctagaaggggcctcagctgaggcagtgcccgtgggccaatggtggccgcactgtcttcctggagggacaggccctgggctcagagcaatgtgccagctggggctgggattttctactctctcttttccaggcaccagtggcagataggaaaggaccactcccccagggttcccctttgggacacatggcctccttccctctccatcccttcctcctggggtttcatggagccccgactgtgtgctgggccctgcggcagctaaggtcaccaggctccaggccctgctcttgcaagagatccagacaagctgcctgggaagtgaacagtgggaagccacacaccaggagaactggagcaggcaggcgtcacggtgcggtgtggggaggggtggacatctgtatgacaacaaaatcctccctctgttttgaatctcgctgtattgaactctgcagtctttaaaataatgtaatctctaggactctgcagcttcccaaatcctattgacctgtgatttggataagaactgatctcatttgtgtctgaatgaatgaatgttgtctgtgcaagcagctgacttcagggctaggctggtctccagcatcataagagcaaaggcatgctttgtggttacagattggcactggagcggccctccctccctctcttttggggacctcgagggtccaggggcgaggggagccgtgccagcagcctgcctcagtgtgtgttctctgagcacctcgtgaccttgctgggagtgtgtctgatcagccgcttcccttgtgaccaaatatttggtcatggcagcaggagagaattccatcagtggacagctctatttttaaggctctggctttgttttctctttcctgagaggcagtccctgcagcaggcttgagcctctctcactgacagcctgcctcgcataatgttaagcaggcatcggacacttgctggaaggcagggaattgcaatgaaagagcacggaggtgagaagctgtgctccttggggtgaaggcagcttctgtgctcctgggatctactgttaagccagggtgacgccagcttgcatgctaccggaggggtaagtgtgtgtgtttgcgtgtgtgtgcacgcatattctaagatgacagcatcctgtctgcctatcactgcctgaagcacccctttctccaaccccactaatcagctcattcgctcaccttcccctatgaatgtatctctttgcccacccctttgcctgggacaacctgtcaatttccagccctcctctctttccttctcttttctgcaaaacctcgtgggatgccacatgagtctgttttgtgttgccataaagaaatatctgagactgggcaatttatcaaaaaaatgtataattggccatggttctgcagggtgtacagtaagcgtggtgccctcatctgcttctggggaggcctcaggaagcttttactcatggcagaagggaagtaaagccggcatctcacagagcgaaacagggagcaagagaggtgcctggctcttttattttattatttattgtattttttgtgtgattatttttaacttttattttaggatcaagggcacatgtgcaagttagttatataggtaaactgtgtgtcatggaggttcgatgtacagattatttcagataatgggcatagtactctgtagacatttttcctgatcctctctctcctcccaccttccaccctcaagcaggcctcggtgtctgttgttcccctctttgtgcccattggttcttatcatttagctcccatttataaagaagaacatgcgggacttggttttctatttctgcattaattcacattggataaaggcctccagctccatccatgttcctgcaaaagacatgatctcattttttatggctgcataatattctatggtgcatatgtaccacattttctttattcagtctactgttgatgggcacctgggttgattccatgtctttgctgttgtgaatagtgctgcagtgaacatatgtgtgcatttgtctttatggtagagtgatttattttcctttgggaattacccagtaatgggatttctgggtcaaatggtaattctgtttaagttctttgaggaattgtcacactgctttccacaatggctgagttaggtcaccctcccaccaacagtgtacaggaattcccttttccacgcaaccttgcgccaggctcttttaaaccaccagctcttacatgaactcattgctgcagggagggcaccacgccattcatgaaggatccacccctatgacacaaacacctcccaccaggccccacctccaacactgggatcaaatttcaacatgagatttggaaaggacaaatatccaaacacatcaagcaccctctaatctagtagctcaatctcagctctcctgcgagctggccctgtggtttttgcacatgcgcttcgtcagtcgagggatcctttctcctttgtgacaatgtgacctctcataggggacatgctgcctgtccagagccccatcagaggcttagctgctcttgctatccaatctctccagggacatcgcaaccctcctcttgcacacccgccgctcatgccctgagtgatagatggtgttgtgtgggctgtgctcctgttacgcacctgccatttgtgccctcaggaataggtggcgttgtgtaggcagtgctcctggtttctgctggagaataactggtccattttgaccttctccaaccccacagtttttacctctcttggactggtgcaggggagcatggctggaggccagccaagtagacattaattcttggtctgtccaacccttgggaaatgctcctttcagcagcgcctccaggagaatgtcccctaattcatagggtcccaccctttaggctttcttactacctactcctggacacaatggctgatccacacgtgagcactggagccatttgggacaatcatggaatcacccggggattttttgaatggagttgatggtgaaatatacagtctctgtgctatcaataaatatcctcctgttctggccggagtcatcctgggagaatggggctgtcatgcggggaggcagatagtgggctcctggtgatacctgaaccttgagcccttctccactgccatttgcttctgtcggcacatccacgtccctcttgaaccacagcaaccaggaggaggccaggcaaagaccctgagagggaggtgaagtggggcacagttgaaaaaacaacacgatttggtaacacacttcaacattgatcccaagggaaggtggattttaaaaaaacatataagaacaagacctttgccactgctcttgtagaagtggaagaacaggacagtggggccaagtgagaggccacctaatccatgggtagtgcctgcgaggcgtctgcaacattgacctggggctctccccactgtgggtgtgtttcctgtgagttcaagggttagtggaaaagaaaacagcaaagcaaggtcatgttaactggaaaatgtgattatcttcaaagaggtaagacaccgtgtgggcttctccagctcacctccaaagaagacacattcattcagatttgcctggatccccaaaagccccctttttgtaaaggtcaacaggaagaaaagtctctgatgcaccttagttctggattcaaaaatatttctgacatttgggctacatggcacgtctggatgtttttctactttctcagccttcctggatcgaaatcaagcttctcacctttaaagatccaaatatctaaccttcacctgccaatggtaatagggcgttttcagggtctaaaataaaaacaaacaaacaaaccctaaaagtaagcaagataaaggcagtagcagggacaccctacaatcattgtgcaggcgcagtcacaaagcagaggcccctgttgggtccagtcccacggcattgcaaagtgaccccaaagtggcaagtctcgattgattcaaagtttccctggccaggctgagggtgcacccaggcagaagaaacagaagtcccagcaggatctgtggcctgtgttttttctaaagagggttccaggagcttcagtatttaaaggggaaagatcaagtgggaggggaagaggaaatgaaaaaaaaggaaggaaggtaggcaatgagggcagtgttaccttcttgaaaagcccggatctgtgctcagtgaacattcatttcacatgcgaaaaggaaggcaaagggtagggggtgggcagttaatgatgcttttgtctgatgcccggtaaatctacattttacataagcaagcatgtgaaatgacagctatctgggaacaaaaggatggcagtttttgcatgactgggttcccaagctttaccttccctttggcatggtgagtttcaggtcctgagattcggtttttcttttacagcattagaaaaagaagatggatttcaatgtatttagacaaggcaagctggtctaattccacccacactacacttctctctgctgtcttggtctagtagctacactcagcaacatttccttttggctcgtgcaagtacttaaacattaaagtatcaaaaatttaaatacaaatgtcaaatattcacttgaacataaattaatatctgaatatctagaggtggacgtagggtgtagggttaaggggaattctactgtattctcatatccctggtcaccttcaaagttcattccaagtaatttacttatttatttgtttatttatttatttatctttgagacaaagtctcactctgtcacctaggctggagtgtaatggcgcgatctcggctcactgcaacctctgcttcctgggttcaagtgattcttgtgctcagcctcccaagtagctgggattacaggtgcgcaccactatgccgagccaattttttgtatttaaatagagatgagcttttgccatattggccaggctggtctcgaactcctggtctcaagtgatccacccgcctcggcctcccaaagtgctgggattacaggtgtgagccacttaatgtaatttaaatagtagtttctataatactaattcatgagaacaaccccattttactgatgggaaaaccgaggccctgagatctgagatgctgaagctatcaggctacaagtggtgatctgactcctataacagtgctccttgctcatttaaaaacatgataggcaccttttctgtgaagagggtggaaaattgcttcaaaagggctttgaaatgtgctacgtaaagtgccttggagaaaaggccgctagaatacaatgtgaaatgcagtgaattttgtattttaattgactcgaaggctcacacttgtcaaggtggggaaatagcaagtcaatgactgtactgcacacagaaattacacaacttctgaaaacaaattgtgttcctctaatggattttacctatgaattaaaaattgaaaattcaattttctctttggccagctgtgagcttttgcctgataggaactgagttccagctcacacagaaccccaaggctccctcaggaccctgggcaaagtccggctcgcagaggaaccctggctcccttaggaccctcacacaggacccctggctccctcaggaccctgggcagagttccggctcacacacgacgcccctgctccctcaggaccctgggcagagtcccggctcacacaggacccgcctgctccctcaggaccctgggcagagtcccggctcacacaggacccctggctccctcaggacactgggcagagtcccggctcacacaggacccctggctccctcaggacactgggcagagtcccagctcacataggacccctggctccttcaggacactgggcacagagtcccagctcacgcaagacccccgtctccctcacacccgctgactgatgaattcctgtgtgttttgtatccgtgacccaaatcaggtaaaagctgcatagagaaatgggaggcggtgggcacaaggatcgtgcgacgccccgctgtgggtgtgggacctgcagcctcaggggcatgcgggctggcagccactgtctccatgccgggtacgtagatactgccatcaccttggggtcagcatctagggccctattggagctcacactcagctctactgggcatcagattctgtctgggatgcacggcgggaattagagacatgggttggaagtggggctcagagatcagagacaaatgtggccaactgaaaatcaggctgggctccagctccggctgcagatgggtggaaaagtcagaggtgcagcagctgctccccagccgcgaacggctggtgaaatgggaatctgatggaaagaggctgcacggtgctcacctgagtggccaggcctccaggcccggcgagggggactctgaggtgagcaggtcggaggtgctcctggttttcccatcagccctggtcagtgtctgggggatgcccaggagaagcagcagaagccctgggtccctgctacccatggagtctagagggccgagcctttgccctgggatcggggagccagggcatcacagacacctcctgcctcatgctgtccctgcgccccggggcatcactcagagactcctccatggcaagggcgctctgtctggtgccagccaggagccaggggaagattcgattaggagactatgggtgccttcgcaggctttcaggaaactctgatggactcatgaggcctctctttcctggtagtggctcaggggtgctgcagtgtgtggctggtgtgctccacgtctgtcttgtcttccaaggggactccctggatcagagttaggcagggacaggcgacctgtttctgggatctccaatcactgccactggaatctaaggggactcacccaaacccacccacagggcaagcagctctcctcgcaaatcaatgatgttccaaatgagtttttccagcagagcacacagagacccctcttcaataactgcttaatatctgtaataggtcttattagtgttttctaagatagagtcctgttgagaaggccggctgagctcccgtgtgtctggcatctggctcggcagaagggatttccatgtctgcttgcaggctggggcccagtctggctctggatggaatgctggccttgcacaaaggaagggagctacagaaggcaggattcagaggctgagtcccccagggatggaggacacaagatgtggaatgcaggtgtcctgtgagcaggggcagggagcacggaagagggcagtctcaggctgtgcagaaggaaaggcagcagcagctgccccggccctctaggcttcctgggtgaaacccttggctttacaaagacccatctcttgaggggcatttggggtgaggcaggatggagaggccctggagtaatgatgtcagggcatgtgaaggaagagaagaagtggttctctgtgctgggttttggcagagaagacttggaaaggatttgagttaatacattttaaacaatgagttttcaaaggttgttccaggcagtctctgtagatgcctctcacgggaggaagacatctccaaccacatttcaggagccagccctgcagctttatccatgccaacagctgaaaacagcgccaggcagcaaatgtgcaaagaagcgtgtggagatgccatggggattcaggccttcagccttgccctccaggagatgaccacattggaaagttctgctccaccgagcttttgtaggcgttgtcagagagcagagcggttccacaccctgcattgcaacggaggcttaatgcagtggctgtgactgttccctccactggggagttcagcgcagagctccccgctgcaaggatctgtctctaagcacctgcctccccggaacaagtcatcacgacaaccaagagagcttgcaaccgagactacacagccctcatccttgtaaggaaaaaaagtgacaggtattaaatagtggctatttgaggaaataataataaatatctttggcagagtaaggctgatggctgcttgagtctcaatggctgagactctgtcagccttcccattatgaaacccatttttcagggtttataacttgaaagtaaaaatgtgctccaagcagaagaaacctggcacacgaggtctttgaccagaaagagggacctgaacagattagttcagatcaatttgagattgtaaagaaaatctgtcctgagtgtgcacatgggtctggcactgggacgaatcacccaattttggttgcaagcaagttaacggtaggggaatgttcatggaaatcttgcccagaaagtacctgcctgatgtttaactggaagtgcctataggtgggtcaaattctgggcaaagagcattggcccagtggctgctggagagtagaggagggggcacctttgcccctagaaagagctcagataggatctgaggctctaggaactgtgcccggtttcctgacctttctgagggaatccatcgaacctggcatctaaaggccattcagtgctgactgtcctctcgatgtcataagtcagattcctgcttctaggtcatccaggtcccaaaagaattactttgcctaataaatgagtacccaaatggggaaccctggttctccatcatcagatgcctccactccatttcccaaagcccttgacaaacaaggtaactggattcctgtccaaatgcaatgttcaaggtctagaaaataatcaaatgaaatgaaatatcctgttcaacactgaacagcctttagaccgtcagtattgctaatagctcgtggtgtcttcctgatagaactgtggattcagcagtgggcacgcatgccatttgcatcgattgtttgtcattagagggtggagataagtgagctgtggcagcactcatgctttctgggaattctcagttccagggcacgtggtccaaactcttagctgggtttggttgggaacctccacagttgaagcatcttatggaccagcttagcagtttaaaaacattcttctattttattttattttattatttttgtattttttagtaagtagggatgggctttaccatgttggccaggctagtctcgaactactgactttaagtgatctgcctgccttgggctcccaaagtgctgggattataggcgtgagccactgtacccggcctaaaagcattctattttttttcctgtgggaaatttggaaagtatagaaaaaaaacaggtaggaaaaattaaatacccaggctgcatcatctgtccataatctgtagctagccagtgataacatttttaaactccatccaatcacttctcagtgatacagagcaatatgctttacaaaagtgagattctattgcatgttttttacattctgatttatgtacttagcattgtattaggtgcatttttctgcctccatagatattcttagaaaaataccatttaaaaattaactccataatcttcccttgtatggattttaaatattctatttatggacgtattgttgttcttattttttgctattacaaaaaatgccttgatgggcacctttacacataaatacttttatgcttctgattatttctttaaaatgcactcctggaggctcctaaaaatgactgcatcaaataatgaacgtattacaagttgttctgatacaaagtaagacaccagccccaccacatacagtataaaatgcttctgctttcctgaaggcagagggtttccaaaacaaagctgaaattcttggataggttactatggccatgcctctttttgctttttttttttttttttctgttgtggaggtaaaaataccaaaataatattagtccacttttctgtgttggttggtaatatttcttcataattcctccttcccttcctttcctagttttggttcattgagagcagttcgcagtcccaccctcctgcctttgaccatgaccatatgacttccttggccaatgtgacatgaacagacacgtgccagaagctttaaacgtgtgtgtggagtttctgcccatcctctttccctcctgccctcagccatgacgagagcatgccccgcgagtcactgggcccagaatgaagagacatatgggacacacttaagccctagtgtcactctggagcccagccggccgagcagcagctgatgagcagtagcttatccatgaatgaaatctaaatgaatgtgatttcagccacagaaatttgggagaggtttgttacacagtattatcacaacaaaacctgatttgaagagctttgtttttcagaggaggaatatgaagcttagaaagatgaagcaatttgaccaaagttacccagaaatcaatcgaagagtcctgttgaaactcaagtctgccctagttctccaggcagtgttgcagcgtggttggtgcacacaagcatggttttataatatcctgtatgctggctggagttttaggggtttccactgatgcctatggcagctgtaggcctgatatcctgccccactcaggaagacagcagctatcgtagacgaggtgacggacagggctagagcagggcctggggaagatggcagcaaaacagccggtgtgaaatgactggccctttaagttacttattacaacgagtaattcatttagaatttgagaaaacgaatgtcagaatgtggtgcttcacacacatgtggattcatatgtgtgaacctgagctagggagtcacactgctcagtgttaaattctagttccttcgctccccagctttctgacttataagttattgggacatctgtgtgtttcagcttcttcttctataacatgggatgacaggagtgctttcctcatacgaatgatgtgatgattaaataatacttataaatacatggaagagtgcctggcatatagtaggcactcaataaatattaactaattactagttttaatatctgcccttcatagcccagtggacttgatctaaagcactggccactttagcttactttttctgctaattgaaccaattaaccatcccatggttaaggtatgagagtttctgaacataaaatcagccctgattatttggagttgtgttcctttgatcattagtaagtttggacgtgcaaattggcaagtggtgtggctggggactttgccagcaagcaagatgtttaaaatcatatctcaatctcatctccaattttgcctttatcaaaatcctctgattataatccagttgcacagagcacgagactgatgtgcattaggaatcccattggccctgaaatctctaaagcctctttctgtttggactccacacatgaacacatgccatttgcatgtttcaaatattgagtgtcagctccttaaaaaccagtcagcaaataaatgaacaggaaagaaagatatggatctaggcctggatattataggtgatatgaatttatggctgtggccagattgccagagtcatctaggatttagcacagttgtcagcagcaggttagctcacagggagtcttctggagtctgggatccagccaaaggccagcaagacaactagggaacagaggtggaaaaattggctagctctgctgattggtcagatgcttggccccaccgcaagttagttttgttactttgaatggatgatgccgcttcctgctgactgagctcagcctggttcctttctcctgctccctgcaaactccattaactgctggaggctgagactgaggcctgggcctctccttggaccaaacctgcatgtgctcctggtgatacatgaaacaggagaagtggggtggaggtgcagaaagtgaagagtcctagacgtcaagtggaaacttggtgccaattaccttcttttttttttcctgccacatccaccaaagccaggaaattcctttctttgtggaatctgcttttccaatggagtttcccatatgattaaacactttgattatatatatatatatatatatatatatatatatatatatatatatatatatagtttgtttgttttgttttgtttttgatggagtctcactctgttgcccaggctggagtacagtggcacaatcttggctcactgaaacctccacctcctaggttcaagtgattctccttcctcagcctcccgagtagctgggagtacaggcgcacgccatcacacttggctaattttttgtatttttagtagagatggggttttgccatgctggccaggctggtctcaaactcctgacctcaggtgatccacccacctcggcctcccaaagtgttgggattacaggcgtgagccactgcacccgacccaattaccttcttatccagaggaaaggaaaatctcccagtcagttgccatcctcttgaaacctggaggtgtctgttctctgtaactgtttcccctgcctgtacctattatagtgcttactgtataacgagtcctcaatcattgtttacttttatctttttccaggactgataagtgtgttgtgctcaaaaatacttagaaagaattaaataatcacataatctctgagtgaagagggactttgtaggcagctattgcctgtcttccgtgatgtatttaactggcttctaatgcaattaattccattgatgggcagccgtgatgctcagatgctctttattattctgagtggaaacgtccctattttttagcagagtgaggggagaaggtggcccaggccttgtagacatatcctttacccccttctccatcctctctcattacagatgagtctttggctcagcagaatgggcctaggtggagcttgaaattaatgaagagatgctgcttccagctttttgagcaagaagaagtttggcctccagttattacaccttgaggtcagcgggtatctcaagtctgagtagttataaaagtgagctgatgtagaaacaccaccaaagcaacgttttatctaaatatttcagatcccccattataaatcatttattatgattacccttttggtgtcatggaatgagatgatgagcttttcttaatgaagtatttcatagacatattttttccatttatcttggtgttggatgctatgtgacctgaatggcaaatgaggaaatatttgtgcaactcctgaaatgcacacatctccccatgccagagtgcaggagcggacagggctttccctggcagcaataggagcccggtcctgagtagggcctctccagcctgactgcaccatagcaggtgacatctgacttggggtgtgccatgttcccagagctgcttttttaaggagtttggtgggagctggaggaagcatccacatctttaaaaacaaaccttaactcgtgagaagaaaagtggtaaacattcaaacacaatttgaacttttaatttagccttgtgagttcatctatatccatttccaggaaaggtcatgggctgaggtgtggtgcttcactgaaataaatgcactttggagttgacagtaaccaagcaaggccagggaccctgaggagacccctccccacacttgcaatgatcaaacatgctacatcttagaaattggatctgccggtttatggcaacttgacgtaaaatgtgtatctcaggtcaggctgatctgatttaaatatcttagtgttaggcattctctatctgacattgtgaaaacgcatataatggaaccaagattagaatatcaagatgacaagaaggattgtaccttgaagacagtaaaagtcacttgcattctggggttacacatttaatttaaaatagttttattccctgttcctagggtccttgtaactctctcctctgctatatttatattaaataaataattttaaatgagtcaaagtgtcttgctccttggcccactatagaatgtcagtgttccttttcaatatttctacttcttagatcctgccttcaccacaatgggggttcatacagggttggagtaggttgttcttctcaccaagttcccaagcccacataaaatggcagcatcatatttcaccggacccagctctgcagaaagtagtggaaaaaaaagtctgtgatggacttaggacccaaggaggcaaaacagagtttggcttttcccttagggctctgtatatgtcaaagaggaccacacatgggccaagtgacgtgcatattgtgcctgggtgatgctgccccagcttctacccaccatggatgggaccaacaaatgcttcccagctgagaggcagtcacagtgccagggtgatcacaaaattgcccagttggatgaagactacccagaaactggaggataacctcacccactctcagctaccagtagggtcaatagtaagccagaagtgaaagctttctttccattgcctcttactttgtttccccatgtcacagtcagctataccttcctaagccataactctgatcatgccccctgcccccgtttcagacccttcagaagcttcactttgtctctggaatgaactggagcatccgcttctcagcctctgaggccccacgtgcactgcacccgcccttcctcagcctccccatcacatggctctttccaaacccatgggctgagcctgctctcagggcctccatgtgccaccctctgctcagcctcagagtttccacgtgtgtcttagcctcctgttctgtgctgcaataacagaatacctgagaccaggtggtttataaataatggaaatatatttcttacagttctggaggctggaaaatctaagatcaaaatgccaacaggtttggtgtctggtgagggcccactctccacttccaagacgatgccttgaacactgcatcctccagcgtggaggaaacacagttcctcacatgtcagaagaacaaaagaggaaagagagagcccactctcaaaagcccttttgtttaaggtattaaacccaccatgagggaagagcctacatggccttaccacctgttaaaggcttcacctcccaagaccattacattggcaattacatttcaacgtaagttttggaggaaagaaacatttaaaacatagaaacatgtgttgtcctctcagcctggaaccaggtcctcattcttgtctttgtcgttctagatcaaccttcaggcctccacttaagcgagttctgacgtcagtgaatacttctgcagcatggaagtgccaggaccctcgttggcccctgatggccaaatagcctcactctccattagaagagaaagcctcactctccattagaaggccaggagagcgaaatcagggattgctttcaaaacaaacagtgtggcaataaagaatttcagaagaaaataaagaatttaccactgttcagtcatgaacgctcataacaggctggggtgtaggaactgtagttgtcacaaccccttttttgatagagaagggaaattgtccagaattatgcaaagcgtaagtggccaagccagcatttgaactggggcccccactttgctgtgctgtctctcacgccttctgcagggaagtgtccttggataaccttcacccatcttcatacctctcccctccacctaggccaggactacacgctctaataggcccagctccttttgcttcataatgcacagtttgcaatgtcctaatcatcatgacaatgaccgtttccagtgcttcttgcctgctgaatggttaagttcttgtgggcagaggcttgtctgttctccccgctatgcgtgtcccattgcttggcagagtctctgccctgcggtcactgactaggctgagcatttttttcttccactgggtgagcatctcagctgtcctgctagctggggataggctgagggagtgctacttccagatgtcttgtctgaacttcttttttttttctttttcttgagacagggtctcattctgttacccaggctggaatgcagtggtgcaattatggctcactgcagcctagatctcccaggctcaagtgattctcccacctcagcctcccaagtacctgagacccagggtctgctccaagggcctcaaccatgtcagctagtttttgtattttttttgtagagacagggttttcccatgttgcctaggctggtctcaaactcctggccttaagcaatctgccttcctcagcctctcaaagtgttgggaatacaggctgagccatgagctaccacccccagccttgtctgcacttttgagtggctcccttggcagggttctgtgcacgatggcagtggggaacagaagacaggactcctgcctcagagggtgtctgggggtatgggaagagagatgctaaccccacacagtgggcatgagaggcatcagctctgctcagagggcctccctgtgcacaccgaactgctgagtcttctctctgaggatcacacagatgtgagcagagcagtgaggaggcacagaaaaaaagggaaaactgggttccttctgagattctttcttgctacactgtttgtttttaaagcaatccgtgatttggctctcctggccttctaatagagagtgaggctgttttgctacagtatgggctgttgggggacaaataagccatttctgtttgctaacattaaaagaagcttccctgctgaggaggtgctaatgcagctggcagaagctctgtgatgggcatggtaggttagctattaggctgccaggagcaggcagcaatctccctatttagacatttcagaggaggccttccagaggccctgggttcaaatcccagttccacctcttcctagctctgtgagcttagggcgaatctctgtgtcctcacaaacaaatagtgggaaataacacttttccccattgcatttacaggtaagtgtggtggtttgaatgtttgtgttcctttcaaaattcatgctgaaatttaataaccagtctaacaggattaaaagttggggtgcccagaagaagatgattaaattatgagagtggagccctcatggatgggattaggtgcccttataaaagggactgatagagggagtctgtccgctttgcacttctgccctctgccatatgaggacaaagcattcctcccttcagaatgatgcagcagtcaggaggtcccctttgaggcagacactaggcagccaacctgccaggctgtggtcttggacttcctagcctctagaaccatgagaagtaaatgtgtatttgttaaataaataacccagtctgtggtattttgttacagcagtttatgaactagacagcaagttaactgagcctgaacttgggaaacagtttaacacacggttcactcattctcttactttcacccactgggctgagcattgaagatacgcttggtagacacgaggcaaatcttactttaagacagtcttcttctaggacagttcagatacctatgaggccagattcttcttttcacccttgcataagcccttttgagcaacttgctggatcccaactccaattcctttctcttgtggaagacacctggcattttcactggcgagcatccatcctccctctgcaatactttctttttttaactagtggaactaaggaaacattacattttttacgtctccaattcatgtgcacaaacacggcatccatggtgaaggacacattgtggatgcttttctaagttctttcatatgactggtaatacatggggaagactgctgggcccacggtgggcctccctgctcccctagactgagccactcaaagcagatctccacttctctgcatcattataacagccttttaactgatctttgggcaagtgacagagtcatgtccttcaaattggcagaaataaccggaaagtattctgtctcttctactggaggcttcttagctggtgaattggaaacctggcactcctggatgccaccgtgtgaccagagccagcctgagaaagaagccacagaaggaagcagagggagagatggagagacggcatttggggtcctggcgttagacccacctctcaatttcacagctacatgagcacctagattgccttgtttgattagctagtttcaggctgacatttaacttttaacccaaagtgtcctaatacatctttttcactcattcctttgttgcttaattagtaagttttaccctctctaagagtctatcctggatgtatgtcaaagtcggggggatgaagacactgccctgcctttggggaacttgtcttcttgtggataaggcatggtcaggccccaatcagcatagcagaaagcaccatgagtaagtgtcccggggctaatgtagaaaataatgaatctgggaggccaaacaggtgaatgggtgagagtctttcagactgcggagtgaatgagggcctgtgcaggaggtcacagtggagcagaggctccttccagagcccccagctgggccaattcagtgcctgtgcactgctcaactgagatgttaccacatcctccttctcccagccctgggatccagaaacccaacacccagtaatttccaggaatctgatggcaatcagctgggcaaggaatcactcagttccagaaacaggcagtgtcaaaaaggagattcaggctgggcacggtggctcatgcctataatcccagcactttggagtgggcaagaccggcagattacttgagctcaggagtttgagaccagcctgggcaactcggcaagactccatctctacaaaaattagccgggcatggtggctcatgtgtgaagattcagtgttagaatagcaagttaaactttgatggtagttctggatgtttgcctcccacttctgctccaacaggaaggtagtcaagattgcatggggcagactttgaattagacagtaagctttctgaggacagggccaattccttctcctttctctcctgtgtacctaacattaggacatacacatgtgcatgcactaaaaatatttaataaagatttgctgactcattttctaaaaacctctttgtgatatttctcaaaatattataaaccagagaaatatagtaaaccagagatacgaaatgaaaaagaaaatatactttcagtgtatttccagatgtggattgttagaagagagatcgtatagcatattggttcagcctggtgccagatgttctgggtttaaattctcacttcttcatttacttgatatgtgaccttaggcaagttactacatctctctcagcctacatttcccccttgctaagatggggacagtcaataggccctgtccggtgaaattgcagtgtggatcatgaggcaatgcgcaaagtgctgagagcagcacctggcccatgataaccatcacgcatgtgtcagttgttgctgtcattattgctattgaaagggagagagagagtgtgttattaaagatggaacccaggagcaccaagattccatgttctaaataacagctctcatagacctagggaagcattaattcatagaatgaaactaggaagtctctctgatcaacctttcacagtgagaaaactgaggcacagagagggaaagtgtcttacccaaagtcacatagcaaaatagcagctgaccctaagaaaatgccagagctccttatatccagtctagaattctttctgcttctgttcttcttcttctttttttttcttttctttttttgagactgagtctcaatctgtcacccaggctggagtgcagtggcatgatctcggctcattgcaacctctgcctcccaggttcaggtgattctcctgcctcagcctccctagtagttgggactataggtgcgtgccatcacaccaaactaagttttttgtatttttagtagagacaaggtttcaccatgttggccaggctggtctcgaatgcctgacctcaggtgatctgcctcccaaagtgctgggattaaaggcctgagccaccgcgcccatcccctgcttctattcttaactcttgggtctgactattgaccaaacatgtatagatgcaaaagccacacctcccaatggaaatctggacctaaatcccatagtgggctcttccctaggagggtgacatgcacaagagacagaccaagaaaagcaccagggctgcagcaggcgagggagtaatttccagcagcaaataaatctgcccattgccgaaggtcattcccgcgttcccttggaaaatgtgcactttgtgtttatgcagctttgaggcaattatttcacaagaaagaaaatctcttgatcacattacttaatgttttctaagtgaacatttggtatttagcggctaagcaaatttacttttctataatgaacagagagtggatgattgaaaaacatttaatatactgaggtgtgggtactgctgtctaaaggattacttaactcacagtttaaactctcattttttttttgaaaagcaaacagatttcctttatactggagagttggggattaactgttttgttcccattaaaatctgactaaatacatgaattgtgtgtttttgcttatgagctcttgggggatatacggatatacttttgtcaatattgaatagccttaccattttgtcaggatttcccattggtacatgcctgctggatggagagtcagttggtaagtgctactgatttagacaaaatcctagactgctagaattgcattcaggttataagagtttttaacattgagactacataaatgcatattaacattgtattcatggaaagcaacaggaacaaaccgtggttctcttcacaactagcaaacaaagaatttattcaaagagaatggagtgggaagaagagcttgaacaaccaggaaggtgaaggaacagggacaggacagcagcgagactctcagccgtcaaaagtttacggactttctgcgagattcacgtacagtgactttaagtccttgtgtctccttgttttaaatttcaaattcataagagagaaagttggagtggcccagctggaggcaggtacttgccaatgaattgatgagctaagaccagagaggcagggccatgcaactgtgtaattgctggggccattccaaggagaggagttgattgtgagttaggcagcaatccccaacatgcattcattgagccaggatggaaatgtcagcaaaaaccaagttgttttccttctttgacagacactgtcagtgtctcatcaacccctcccgcccatcacccttctgcactccctattccaggcacgcccatgagtccctgcttgcttctttccttggagatcaacatttagatttctcatccctcagatgcaaagaccccaagtggcttctacatcaagtcccataattccccagggcagtgaagcccccagttccctagtggtccccagcagtaacctgctccttagtgtccttcctttcttcttccacttccccatcccctacctgtgccatctgggatcacgtcccaagaaaaccacctgccccctaatccttgtttcagcatctgctcctgagagagtccagcctaagacacattctctctagaggcaaacaccaatgtgcttataactgatggctgctctcttttaatggacttaacagcagcctcactgcagagggagtctggccgtcccctggttttccagcttcagcatgactagggaagggtctggtggtgaagaaatgcccgtgcgccatgcctggccagggagagggtcacaatttttctcgtttggaaaaaggctgactgcgctgctcacagccagttttcagcttagcgtcagcttcgtggattgttttgggtctgtggatgttgcctttccaactgcataatgagctgcttgaagccagggatcacatcttcccttctgtttgtttctcccactgtacaaaacagaggggcggatacactgaagatgctcggaagagatgtgttgcttaattaaagaaccgaaagaggaacaggcataaccatttcattttctaggccgggggtggggggctctgctcgtggagtatggtgatggtccgtggagttttgagtgggctgttgcaggcaccctcagagacgttcccttttccctttagcactcactgtgtgcaaaccaaaggcttcttacagcaaataccagtggctccacactcaatcttgcacacagggcagacaacaagagccagggagtaaatgtaccttggaacagctctccaccagccaccactgggatatggcgggtgagcactccagcttctttgccccgcggctagaacaattctgaaacgtgtttcacagcatgcaccaaatccaacaggattaaactccattttcccgcaaggcaagctgctctaacacaccctgcattggttttctttcctctccatctcccagctccctgctcctcactcagtgctccctggagtcgctcctggcccccacatcttcatcacgaggtctgcttctggtttaatctgagataaagggaaactggtttctgcaggtgcggaaagttccttcagagcccaggaaatgattaagggagacttagtgtcagtatccatttactttaggttaaattcatttcctatgtggaccaatttctgatagaagcctctccttttttgttgttgattttgtttgtttttcatcctccagtacgtgcatgcttcccttcatgcagaacattcttttacaagacagacagtatttccccaggctggtgtaaattattatcgaacaatgaagccccttctctagtcatcattccggtgccacctggccaggctcagataaatggcctattctggaggtgcaggaaaccggatgaatcatgacgttatcccaggaacatggcagcccggcagccgggggatggagtatctgtaagtgtggccccatggaagctcctgcaggacagagcttcaccattattaaaatccatcctattgccaagtccgggaaacactgtaggcacaggaccagtggcccaggtctgggtttagaagataacattttcctcatggcctttttccaaatacctaagtttcatgatgaacaggccatccagaatccagttagtagggaaacaagtggcttacgtttcctaattttacatttagtctgttggtattaaaactcatgtgctgaactgggcattgctgctattaacctctttctcaagttgatattagatcagttttcaaatggagactctatttggagatggtcttgtatatgtttaggttattttacagccacaaagcctcaaatggcttcacttaacaggagttcttaaactttggagataactttgagatttgataaaaggctggtccgcttcccccagaccaatatcattaggtccacagtcaacattttgcatacagatatagtgggtagaccctcagagcccatccattgagtcactagggacttctggatctccagcaaagacagctgttggttgtgactggttagtgactgtggtaatcttgggggtgaagctccagcctgagtcatccttctgatgaccgggacgaatagtatgtctgatgataaacattgcatgtatgaggacgctgtgtgaagaatgccatacgccggtctataggaaaatccatcatgaagtgtttggggatagatactagacttgaacagtgcgtctaatgcatcttcgttctgaccacatggactacttaaaaacgttaaattcaagaagtggaattttgaatttaataactgtaggtattaatgtttcgtaagttagaaggatgttggtaccaccaattgcatttaattgtcttctgtgtttgctgttataatttatgtttatttttcttcaaaactgataatgtaatacaatagtaagttgtatataccttgaatatagcattggacagtatagattgttatataaaaataacattaaatttatctataaatctataaccccctattcagaggctaacacttcaaatagtttgatatttttcttctcatttcctctgcatatatgtatacagtttttattacttagcttaatatattatttgtttttacctatcatcagatgttatttttaaagtcatctttgaagatttagtaaattctctgactggaaccattcttctattgttggggcttttgaagttcacaatttctcactcttttttttttttttttgagaccgagttttgctctgtcacctgggctctctgcaacctctgcctcccaggttcaagcgattcccccacctcagcctcctgagtagctgagattacaggcactggccacgatgcccggctaatgtttgtatttttatttgtagagacagggtttcaccatgttggccaggctggtctcaaactcctgacctcagacgatccacccccccttggcctcccaaagtgctgggattacaggcttgagccaccgcacctggccacaatttctcactttttctattacgcttgatacccaaactcttttctgttcctccacgatgctctgacatgatcctaagcttcctgaggtcacctcccaagaaaatcacctgccctcaaatcctgggcaatccagtggcttatcagagaatgtattttttttccccaaacaagcatggtctttccttggaaagactgatggtgagtaattttctcttgctctttacaaatgctctgtctcatttaaccttcacaacaacccagggaggcaggtaccactttccccatgtggcaggtgaggaagctgagctcagaggggtcactgcctttcccacagccacgtgtggagtgagcgggatttgctctcagctctgccttggctgagtcctgtcttctcgccagcgcttctcgactgccctggtctgggtgccccaccactaccctctgtgagtccgtgggtagttgattcctttcctcaaggatctactttctcaccgccccttccatgtggaagttttagaaaccttgggctactttaaacaaagagccgctggctgactgctccctgcccagagggcaaatcccggtttcggagttgagatagacaattatgtaaaatgaattctgggtgcacccagttgtctaattaatgacacattatctatgtaggagaaaatgtatcttttggggctcagctcagactctacatctctcctcctgggcctccttgatgaaattaattggggcaggcagggggaaattgacattttagaagccagttttcattcttggactgaaagaaactgttccagtgcctgtttacctgggctgcaacacacacacacatgcacacacacatacacacacatgcacacacagatgacatgagcccctgaagttgctgtaatctaggaggccacagtccagagcaattgcattgaaagcagccacccatctcaacattgcagccgacgagagtgaaatcagggaacacattccaggtccaggcaatgaaggagaaaatgtgccagctcttgccacagccgttacttacaaaggttttccacctgtaatgtatttcccaatgctgtgtttctctgatgctggctctgcctacacccacaaagcaagataagagggaaagtggtggctggacacagtggctcacatctgtaatctcgacactttgagaggctgaggaaggaggatgccttgaggcccggagttcgacaatatagcaagaccccatctctacaagatatttaaaaattatctggacatagtggtgtgcatctgtagtctcagttacttgagaggctgaggtgggaagatcccttgagctggggaggttgaggctgcagtgagccaagattacaccattgcactgcagcctgactgacagagtgagaccttgtctatatttaataaagaaaaaaggaaagcagagccttggacatggcttggcctagtacacacctgtctccttggtgcattcatcctatggagcccagggggtcttgagctgtgaacttgtgagggttggacagagaccccaagcctctgctgctttattgtgaatacaatttgcattactagattatgctccaggcatcgttacaactacttgcagatattaactcatttaatcctcactgatgtccacatcctggtttatcaatgaggagacagccatggggaggttaagtatagtgtgctcaggtcacattgtctgggcatggtggggtcgtcagtgagtgtcttgctctgacttggaagggaagtaaggagtttcccgaggttcctcttgctcaactgcaccctccctcaccgctcacctctccagggttccgatttaccaacagacaccctcagggcacagcttgggagtcattcggacaaatgaatgctcaactgagaaatgggtagaaacaccaaatacatgctgaataccagctctatgcagatattgagctagacgcttctctcaacatggctcatgtagccctgctaaaaacacagcgggaagggggaagaacgaaagtaatgcatatagaccatgctacgcattccatcctatataagcgaactaacttcttagcctatgctagggttggtgaaccatgacctacaggccaagtctggcctgtcacctgtcatgtgagtaaagtttcattggaatccagccacagctgctcagttatggttgtctatggctgctttcacactgcagtgtgggatagagacctcatagacagcaaaacctaaaacatttactgtttggttctttacaataaaatgacccctgatttatgcagtccttataacaactttgcaaggtgggtataattttggagatgggaaaactgaagttcagggaattcgaagggttagtttgagaccacccagaccatggcaaaaccgtgacttacacctgcaagtggttgcttctcttgctgaatgatagggtgacacagcagcccagtgtccctcagggagtcggggggatggccccgctgtgttccagggagagggagggactctggagctgctgcactctgatctgcctgttccctcggctcggctggctcagccactgtgtcttgtcttgctctctccaagagcacagttgaccttccctacagctggcttgctaaaaccgtctgacatgggaacaacaatacattctatcacattcagcacaagaaatgagaggccacacaattacttcaagaatgaccaagaagaaagaagtgattaaatttttggcccccactttttttcctccccgagatgatggcgttgattttgagttatctccctaaatggctcgtttgtgggaacttccccaggctaatctgaagaagggcgatgattgcaggcagaagcgagtccttgccctgcagcaagatctcacacctcacatcctgatgtgggccgcagggagtcccagcatctctgagaccgtaggcacgaagctcaactcctccatcacctgctcctcttgccggacacag[450 bp omitted]tggcaatttcagtcctttaaaattattattttagaaagattcaaggtctttctcataataatacctttcatactacttttatctatctaatttttcaaagaaaagaaagttggatttagagaaagttctccagggtatgcactgttttgggatgagctatcccacacccaggtgtggcccccagtgcagatgtatttgctcctattgacaaagtaacaagtcacagcagtattctccctccaacctttgaatgtcagcaaaacatacctgcctgcaagtgtcccctgttgtgaatgccaggccccccagtccccggccccaagctcctcatcagcctcctgccttgcatcttccttccagacaccctggcctaggacagacacaagccagccagctctctccctgcctcccctgccccagcgcttcacacttgtgccccttcacaactggtgtcatgattaccttccagctgtgtgcttatttatctacattgtctaaataaagtctgcgttatcatgggtgtgatatgttagattcctatttttctaagatacaggaaaataagcgcatagcctctgacatgtgtctgtgtcgtatcagatgtcatctctgggctgcccactttggctgacatggctctggcccagctggtgctgctccttggccacggagctgtctccacttcctccacaggtcggggccttctaagacagccgttctgggccctcagtggctcacaagcccaccctaagagcatctcgccccctcctgctgtgcatatctctggttcctgccctggagtttccccgttgctgtggaagtgtgagatactgagaagtccacccacagtgcccacaccagcccccagggatggagtgttggggcgttacaccccatagagtgaaatttggatgagtgggaaacaggggcctatggctgaatccttccccttcctatcccactccccagcctctatgctgtgttgggacccagcagttcccctggcctccctaaagacttgctaagatactgagcagtccacttgtgacaaagcctcaccctactcatgatattctcaccaaacacgagcaaggcagacacagctcccctctgcctgcctcactttgctttcctgggactgcactcgacagcaaagtgtcagtaaagtcagcttctgcctcaagttctgctttctagggaacccagaccgcaacaaatgcgcagcctaaaatcatctcccagcccaccagggtacacaccacccttcgccaggtacacccatggcctttcccattgcttcatggtattatcccatcaaggctgctaccctgggggccaccgttcccggacctgcagctcctctcttccaccatttctgaggtggctcccaagcctccttccctctagcctggaagggacccacctcagggtccctgtggtcccaactctgcacttccctaggggcctcaaccctttctttcttgtatgtagatagtcacagtccatgccatcctcctctgatagatgtggtcctctctatggcagggactctttgagcctcattgctttctgctccacagacattggtagaggaagaaatgagttaccaagaggagaaaagtgttcatgtgtgtataacaaggggccatgtgatttaaaactgcaccaacctatccaggaagatgggttctctcaactggattagaatgtgatggatgttgatctgcccaggtgagcctaagccaatcttgagagcagctgtctcaggccaggctgccctgggagcagaccacaaacaagggaggagtgtagttggtttacctggaaggcgattcccggaagtaccattagggttctgggaagcaggaaaagcggggatgaggagctaattggaattgagttgtcggcatgtttgggttagggcatgggtctctggcctgaatcccactggagaatgttgagagtcagtgtggaacacagcacaaggtggtcacagccaaggagtgaggattctcggggtatccacctgtcggctttcctccagcattggtgagggctgcttctgacgtgtgcaagaatggccagaaacaaaaacccctgggaggtggagttgcagatgttgactgtcggcgactctgacttcatggaggtgcagtgggaaaccaacaatctccgcctcattagggctccacctccttcattgccatctcatggtgcacacagagttcggcaaaggagaaccccagctctcagaagccttgctgcatacccaagcgaaccactgtaggcatccaggatgcaaacacttctctgcttgatgctgaactagcttgccttaggagcagcccagcgtgaaatcccctcctttgctgagacaggctcacacgttcttccactacacatgcctgctgccttttcttcagctccatggagaacgctctgggcaccaaggcctaacttctcagcctcagcttaccaaaggcatatgtggttttgctaatttctaaagaagaaaaaccaccctgcttcccttggagccctaatagcaccaagacccggcaagatgaaggccccctgtctctctgcagagctgccatcccctgctgggctgtgcagtgacagtggcagctgggcgaatttcctccttgctgttctgaaacagaaattcattctgtctccaggccaagccctcagctcactcactgaacaccccgaccccctgcaagagctccaaagtcagaattgcatttagcttagggtgtcaaagccctgcactgagccttggaacacttcagtttcctcctgtcaggaaagagcaccaggaaaagaagaagggcccccagagatccgtaactggggctgatctgagctctcagggaaacgggcttgagagtctggggtttgtgtaggatgtttcaggaaagcagttcttgtgtgcacagcttcagggttgcctggcatttcatgtgacaatcaccgtgttgggactgaaatgatgtccctgccccttcttaactataggcagccaggaggacaatgttgaccaggttatgccagacattacctgtagaatagactaatgtgtttttctcagagttgtactgggccctaccctcaggctaaagaggtttcagaaatgatgatcagatggcttaggccgaaggttggagacacatgacacaggtgcagttaccacgctgctcttccccggggcagacatcaccaatcaatcctgagcctggaaacggcctttccagctcacccttctgggcagccatgactgtaagtcaggttacgcacacaagctcagctgggtccctggtgtgtttctcattgaaactggcacctgtagtgagtgccacgggacctggacagcacccctgacctgcacagcctctttctcacatatgccacacatgtgtattcatgagaattcactcactggttcattggataaatgcagtttattaaacatttactgtgtgccagggattatgctcagatgatgaggattcaaagggagtaaacacaagaccagagctgctccctgggagaagcctgcatagcccagcctcatgactgaaggtaaagtgctctgtctacaggcccagggcacaccaggcatgtcacagccaccctctgagcaagcagaagcccagagagagagggcatgagtgcagggaggagaaaggagaaagccagcagagatggattgagccaaatcatatgttctttatgacatcttgtttcccagacacttcccaggcaagctccaagatcttcaaggaggaaagggacaaactggcccttgttgggaggagtgagcaggctggccacccctgtctccccagcccaccctcactcttggggggagcagcacaggtctattcatacatggggtgatgtgatctctggatcaagggtcaacacctgcacaagggcagccatccagaggccagcagcctaggaagggccccaccaggggctctgaccaacttggggaggagttgacccatccatagctctggagcctgcacctgagcttacaaaaaggactggccagctggagtatgagaggcatataccagccatgagagagggagagtgagcagctgcacccaaaacaagtcccctccagaaggtcttctggcgtgcctccagtgggcctgtgtcctcctaattaccttcttgctttcttcttcttttttcttcttcttcttcttcttcttttttttttttttttgacagagtcttgctctgtcgccaggctggcatgcagcggtgtgatcatggctcactgcaacctccgcctctggggttcaagtgattcccctgcctcagcctcctgagtagctgggactacaggcatgcaccaccatgcccagctaattttttgtattttagtagagatggggtttcaccacattggccaggatggtcttgatctcctgacctcgtcatctgcctgccttggcctcccaaagtgctgggattacaggtgtgagccactgcaccctgccactttcttcttaaagagtctcactcactgttaccataggaatctcccagtaactgggatgatgagcccaggaaccaattaataggggtcattgctcaaggatccaggacttttactcaggacaggagggtggcaacctggcacttggcaaaggaaagaaatgagatgaatggagagaaaaggaggggccagtgcataaactgcacactgggctgggctctctacacccatcccctcacagtattctgaaaataggcttgcgaagtgggtgtatataagtgctattcctttacttcaagaaatgaggcttagtgagccacatcatttattcatgctccgtggctgatctgggatgcaaattcagtggatggcttcagatcagaaggaatccagctgctgtggttcaatgctctccctgatctgcacagctcattctgccttctgtggctcccacagcccctgaaaccaagcctcgtgtctagaagatgccccgtaaatgtccaaggaaaggaagaaggaagaagaggcaagcactttgggtagggaaaagccagagggaaggaagagcagacagcccagtacctggagtctcttatcatggcaagagtgggttcccagggagctttaccttgccctgtggagaggcccgccatcggggctccccccacattccctggcccctgtcaccctctggaacacacccactcggtgcatgcccactcccctcagcctccttgggtctctgtgccagctgccctgactgaccttgtttgcctgcactgagggctaaaaatgcctcaggagttacatcaccccaggatcagccaccactaacaaaggggggggtaggtgtaaatgtccccttgcttctttttaattgttttttcttttttcattgttgtttgtttttgtttgcttgttcttgagacaaggtctcacactgtcacccaggctggagtgcagtggcgttatcacagctcactgcagtcttgacctcctgggctgaagtaatccccccacttcagcctctccaactacaggtgcatgtcccaaagcctggctaattgttttttattttttttgtagagacagggtcttgccatgttgctcaggctggtctcaaactcctgtcctcaagtgatcctcccacctcagcctcctcaagtgctgggattacgagtgtgagccacggcgcccggcccccttgcctctgatcaggctagctctctaaaccttccagagctccctcttggggccaagccagcaccccctggggcctgttcttgatgctgcatccttgggtgccattttcctctctgccccactttctcactcttctattagtcatttctgaataattgtgttcacacagatccatattttcagttctttttctaggaaatccatcctaagatgagaatctcatcagaaacttcccttccaggcctgaagccttccagtagcctctttgtggacatgtcagagctttggtagagtctgaggctcaagttcaaatcctgagcaaggtcttaaatattcctgctcagccggattcaccctttgggatgtgagtactagtggtaagtctcgaattttttaaggattttgctcaaaatctttttagggagttgccaaaatgccccaaccaaagcaccttattacctgtcttggaaaattccaatcagggagatttgggataaagtagacatcaaaataaagcttttatgagtagaagaattataacatattcagcattgttttagcccatccagaatgccagacactgtgaagttctatttgtgagctaccatttattcctgccacaaccctgtgaagaatgaatgatcatatttctcttccctctcacaaatgaagaggagactggagtcaaagccttaagaaatccatcttagcacacctagagtccagtgaaagagagaggctggcggctggcatggtctctcttcctggagtgggcaatggccattagcaagacctggaagaagttagcaagttctcccaggagtggctggttcagatgccctgcctttcaggccaggctgaagcaagaggcagaaacactggttgatgaggagtcaaggactgccattcaccaaccagtgcaaaaccccgtgtgctcagaagcccctcctgggacctgaccttccacctcggtaaggacagaaacgatttggtaaggtacatccaccttggagaaggctggatttgcttactcgaaaccagagagcaattccaatttgagtgaagaggaccacctgagtggggtgaggaataagtgcgagccagcacagagtgagcaccaacagcatgaaggaggctcaggtagctccatttcctggcactgactgtatgctgggcgtcacgctctgtcctttctctcatctaatcctcagggtggccctacagggatgttctgctctcatccctgttggagtgtcaggaagggttagggaagatgaggcccttccccaaggtcacgggctcctaagtggaggctgtgggatgggacctcagctgcccctgactggactctcagccgctgtgctgcactagtcatgacaggtttccaggagcccacagaacctcagctggggaaggggctctctcggggtggggcctgtgatgaccttgaccctgtctgcagagaagaggagaacgggagaggcgtgactcatcccctgccagtatggccggactcacaggcagccttgcctctctggctctcttgggacgggccactgccatggtgtcaggattgccactttcctgtcctcatcactgctgctgttaataacacacgaataattcaagccataaactttgaggcacaggctcctctctggccctgggggagctgccaaagatagctcaggctcggcagccccgcagcatggggcgagtgagagaagcgtgtgggggaagcgcttgtccctccaggctaggctctctcagtgcttccagatgcactcagggcctcctttcctccacggcaaggcccctcatgccgtcagcccgtgggcaggaggaacagcgctgggcggcattgacgttctgtgttaaagcctagaagaggagctctcttcctttttcttcccatagggcatctgtctgggaagcaatggttgggcctggagggatctctggggacatccttcctcatgagctgggcgtagaagaccaggtgttcaccagagaagaaaagccctggcagcaatcctgggtggtgctgggtggtccctgtggctgctcctggccagctctgagagaaatcatttagcagaaatggtgctttttccacccaaaatgttgtggggggcccaggaagggctaaatctgcaactcgaccaagaggccctccaaagaggtgtgggttttttgtgctcccagtgagcagcctgttgctgggtgacaagccagctgggctcccaggactactccaagttgtatccctcaaagttccacattttaggagacttctctgactcggacaaagcaggatggggagcccagagccagtgggggctcatgaatgagatgtccagaaaaaagctgttcttcaagaaagattttaactttaattaattaatttattcattcattcatttatttcaagacagagtctttctctgttgcccaggctggagtgcagtggtacaatctcggctcactgcaacctctgcctcccaggtttaagcggttctccagtctcagcctcccgagtagctgggattacaggcccacgcctccacgcccgactaatttttgtatttttagtagagatggggtttcaccgtattggccaggctggtctcgaactcctgacctcgtgatctgcccacctcagcctcctgaagtgctgggattacaggcatgagccaccacgcccagcagattttaattttaaatcttgaaacacaacaaaccccagccatcctccatgcctgtggggtgcatgaggtggatcctcacacactgcaccagaagcatgactggcagcaacaggcagcttagaaatgtctgatcatttcacccagaagctttctcctgtggcttcttaagaagttataagaaactgtggcacaaatcttagtattacaatgttctcctcttcctcacatattataaaaaaataaaaacaaaaacaaacaaacaaaaaaaccaagggaaacagatcactgatcaaaatacacaatgattaaaatcattgtcctttgaccatgcacagtgactgatgactggagtcccagcactttggaaggcagaggtaggaggatcacttgaggccaggagtttgagaccagtctgggcaacatagcaagacgctgtctttacaaaaaaaaaatgttttaaatagctgggtgtggtgtgcacctgtagtcccacttacttggcaggctgaggtgggagggtcgcttgagcctaggagtttgaggctgcaatgagccatgatctcaccactgcactccagcttgggtgacagagcaagaccttgtctcaaaaataaagaaagaaatagatctaagtctttcattcctgggcagtattttccagcaaagaattaccttgttctgtatgcctgtatcttttctttttcctgtcactgaatcaactgtacatatggtataatcctaaatttgtaaacaaatattaaaaatatgcacataaacctgtttacatgtcagaaaaaagactagaacaaaatatacaaaaaagagatgactttgacattttaagagacatcacatcttttttttttttttttttgagatggagtttcactctgtcacctgggctgaagtacagtggtgtgatctcggttcactgcaacctctgcctcccaggttcaagcgattctcctgcctcagcctcctgagtagctggcattacaggcgcccaccaccacacccggctaatttttgcatttttagtagagacagggtttcaccatgttggccaggctggtctcaaattcctgacctcaggtgatccacctgccttggcctcccaaagtgctgggattacaggcatgagccactgcccctggcccctttttctgttttataatgtaagcaatattgaaattccagtggaaaaaaattctctttaaagttaaaaaattctaatttcgagctaaagaaaactgagaacaataacaaatatcaataccaccaaaaatttctaaaacaattacagtttctggagtgctatggctcatgtgacagtgagaggacatggagcaggcattatcatctccaattcacaaaggaagaaacccagaggccgtgtggctccctccgtgacaacagctcacaggtgagacctcgtgggccgacctcaggcctcctggcatctagcccgtgctctctgtgatctgagttgcctttttagacttctagggcagtcgctccttctctaaaaatcagctagaagctcccctgagtgataacgggttgagtttgcctagcacagccctaatttttgcctatttttctggcatacttagtagtaccctttttactctcagaaatagtccaatgaggaaaataaaatgcctggcctccttttcaaggcatattaacctcttcatgtttctgtcggaatttcacaaagccaccctcctggggccaggagtggaggcccgcgagctcccgccccacgcctggtgggtgcagtctccagctttgcgctttgtttgtcattctgaacagctctgctcccatcagctggggctctgtgaatcagagacgctgcaaagagcagcactcccaggagctcagatgaaatgcgactgagggcaactcctcccagccacagacagctgctctgcagggaggctcagcagcgcccagcaaagtgcctgctgtgcactgaaagatcctcaatgggccctgattttccgtttgtcctttcagcagtcacacattcaacacattgttgaggagcagctaagcgccagtcttgggcacagattaaagaacaagaaagaaaatgccgctgtgcttacggtactaatattctagtggggattcaggcaacgcacaagaaatgcacatgaatacatacaaaaatagacaggtgctatgataacacagaatggtggtaggtcggcttcaaatggtgcagtcagggaaggactccggggagggaattctatggtgaactccaaacgggaggaaaaggtgggcctggaaggatttgggctggaagagagccccactctcccaggaatgtcaagggcaaaggccctggggtgggacaagcttctgcgcatttgaggaggatggaaaggaagctgggtggctgacctgtggagtgagaggctggagggtcagtccaggcagcgcacaagggggattgcgaggatttgggactcagctctgactgcagttaagaaatatttgagctgctaagtgataagccttggcgtcatccacacagtgttaattctgcaggcgtgcagatctcaagagtggtgggggctttcctcgtgggtcaccaggcggaaacctgccgcaagggtggagccccccacagagagccccttctagggcaattccaaacagaaaggtggggtcagagctgccacagagtccccactagggtaatgcctagtggagccatgggagggggtccacttcagggacccccagactgcagagcagccagcttgcagcatctcatgggaaagattccagcccatgggcgcaggaacatggagtccatcaaagccatgatggggtgcgggggtgcagggtgctgcccgagtccttgggggcccaaacctcccaaagtgcattggatgctggactgggagtgaaaacaggtgattctccagcttcgagatttagtgtctgccctgctgggttttggacttgcttgggctcgtcactctcttcttcttgactatctctgccttttggggtggggataccctgccctattcccatcccagcattgtgtcttggaagcagatgccttgtatgatttcacaggctcacagtaggaggatttgcctctggatgaattgaaccttgaatctcacgcacatcagattcagatgggactctggacttagcactttcaacttaatgctggaataaattagaacttttgggcaggctgccatggctcatacatgtaaccccagcactttgggaggccaaggtgggaggatcacttcagcctaggggttcagcatcaacttgggcaacctagtgagaccctgtctctacaaaaaataaaaaaaaaatagcagggcatggtgacatgtttctgtagtcccagctgcttaggaggccaagggaggaggattgcttgagcccaggtatttgaggttacagtgagctatgattgtgacactgcactccagcctgggcaacagagtgagaccactttttttgttgtttgtttgctttgtttgtttgtttgtttggctttggaagtactgagatggagtgaatctattttgtatgtgagaaggacgtgagttgtgggcggccggggcagaaggctgtggtttgaatgccccctccaagtctcatgtgcacacataatcctcactgtaaccatgctgagaggcaggacctctgagcggcaattaggactagatgaggttatcagggtagagcccccatgatgagtctgggactttataagaagaggaagagatgtctaagctggcacactcagcccccttgctgtgtgaaggcctgtgccacctcaggactctgcagagaggccccaccagcacgaagaccctccccagaggccgctcctccgccttgaacttcccagcttccagaaatgtaagaaatacatctcttttctttattgaaagaaagaaatatttgcagtgctgagtgccatgagcaggtcccctggttcctctaaggaggacacacagaaggagagaaggcatgagtgtggcagaagatgaccgggagaagaatgcaggggctgggagcgccttatgcaagaggggctgcagtctagatagagaagtgtggtgtcaaggctaagtttgaaatctgaatacagtttgcacattaaaacaaaaaagacagggttgtctaggctggtggaaattgggagggaggagcagaaaaaaataaccaaggagtacatttcaccattagtttaagtgagtggtagatggtgtgccattctctgagatgtgataaaaagggaggtaaaggtttgggggttggggtgtcctggcactgagggagggactacagaagctgtgtttcagacatggtattctgaggtgtctctaaaacatctgagtacagatgtcaaagagacggtcagatatgcaaggctggagctcacggctaaggtcttggctagaggcataaacgtgaaaagcatttgcatatgttgaaggcaagatggtaaaactcctcaagaataagaaagtagtcactagtgtcaaaaatttgcagagggaaaaaatataaggacattttgctttttgtccatacatttggccaaagtaaaggtgattggtgacattgatgaagcagttttcatggagctatagggcaaggttcacattgtggacacggagagccctttatcagtacagcggccaactaaataaataaaaattattgctaaggcttattccaaaacaaactcccaataatgctggataaaatgcataaaacaaaccaagttttcaaatgcataaattagcacacaacaataagacaaatatccagaaaataaaactagggcagaaactaaaactaaagttataaccatgacctgccagtctccccagccagtgagcttaggttttcatggcttctgggagatgaagccatgggcctgagagagctgggcagttggagctaagattttctcctgcccaccccacagaaagccaggagctctggaggggtgccatccccatgaaagaatggctagaaacactgaggccactacacagagagagaatagagaagcctgtcctccttgacgtaggctccaggacatggtaatgttttaaagtggtatccaccatacggttaaggaaaacagcctctggcccctagccgcgacaccatgaaatatgtatggcttccttctctgttcatcccctctccgtcagatctcccctgggaacacagaattattatccctgaatcacatgagacctttccattctccaaagctatggagaaagctacctcaaatgtcaatgtccgcatatccagtgtcagagttcaggctcacctctccttcaaggtgtccagctgaacaaacagcctttcactccaacactttcatcccaaaccatggcaatgtgaatataatttttaaaaaagcaagccaagcccaaacaaattctatgtttataccttcctccttttttggttaacctctactaagggacccaatagtgttacttttgcatgagaatctgagtttataataaaatagttctgctatgctcacagtctttctagtctttgtagttctaaattatgaatccctgaggagcttggctgggagataatctacataacagacagcacactccatcagaatttctcctataaaacaaccaagatcacggagtgttcttactgggtgatcttgccatgcctggctccctctcccctatagtggggactctagcagaaagattcttggaaccttgaaaaatggccacgtagggagcccggctaccagtttaccagttgtacttggattgcagctgtgcacagtgcttaggctcaggccccattcatactaagaattcctttattccatcatacaggagctcaagagcacatttaagtttactttattcatttacaatttgtattctgtttatttatttactttgagatggagtctcgctctgtcacccaggctggagtgcagtggcacgatcttggctcactgcaacctctgcctcctgggttcaagcaattctcctgcctcagccttttgaatagctgggattacaggcgttcaccaccatgcctggctaatttctgtatttttagtagagacagagtttcaccatgctggccaggctggtctcaaactcctgacctcgtaatccgtcccccttggcctcccaaagtgctcagattacaggtgtgagccaccatgcctggcctgtattctacttattttttaaaagatgagattaactcaaaattacataaatgtattaaatatgtttttaatctctcaaataatgacataagctatatatgctatatatatatatgtcattggtttgagagattaaatatatttaaaagcagaattacagttgagagattgagatcatttctgtaattgtacactaaatataacacagcacttcctggtagccaaggcaaaatcagaaacaagttcagttgcctggctctttttttatcttatcaaaggaagcatacctgttgtttaaaagaaagacttgataataagtatgaaaacattaatatcaccagagaaaataaagcaatttttaaaggtaatgcatgttaaagataaggcattatgtatataaaatgcgtaaattttgtatatgttgcttatgcctggaaccccaacgacaatcttccagttgtgtcgatgaaattgttcttgttgcatttcagtagcttcaggttcccggagggagaatgtgaatattcatttatttatgacttccttgggacactgctaaaataaaaattatctgttgaaaaaggagtaaacagcaaagagaaaaaggcaatcacaaataaaattatcatcaaattttagaagacaaatagttttacgtaacaagttcatgaatgaaatggacagagaaagctgcattttagaaaagcaactggactgtagaggagatgaaagccagtctgtcgtccagcaccccagacaagactgggctcagggtccttcaggagtggctgggatcaagagaattcttagaagtctgcagtagtacaccagcaggttaccttccccacccactggtccccagaggaggacactcagtaggacagcttgcttctagcaaagcccaagatggcttttctctaaaaacattgaaaagatacatggtggatgcaaaagcatttggggtggacaatggcagcccagcgtgacaccctcctcattctggcaaggaaagggatggacagaggcctgacactcaactctaatattctcccccaccctacacagggctcctagtcagacactgtataagtggggggccacccaggcatcaccaactgtaggaagagaattggcaagcaggaagggaaggaccaaaatgcacaaatagaaaacatgaccccagagaaagtagtcaattaagggaatagaaaagaaaagaaaagagaatgtgattccgaatttactcaacaagattcaaaacatgtattagctataaaataaaaagaataactgaaattggtaaatcaaatacagataatgagaaggaatgaaaaatatggcaagtaaagttggaagaatcttccggaataaagatcaaaaagtaaaaaataaatagggagagaaaactgtgcagaatatcccatatctaatcaaagcccccaaaagaaaagagacaatggatgggagaaaatgatcaaataaatatcagaaaaggcttttctagagctgaaacacttgatcttcagattgaaggcaggacgatcacttcagcctgggagttggaagctgcagtgtgctatgattgtgccactgcactccaggctgggcagcagagcaagactctgtctctaaaaaaatttaaaaagtgtctaccaaggtcccatgtctggacacattctcatgaaagataaggagactatcttaaaagctttcagaaagacaaaaataaattcacctatgaagagtgggaatgaaaaagcagtatttctcatgagtaaccttagatgttagaaaagttaaaaagaggccgggcatggtgggttacgcctgtaatcccaacaccttgtgaagccaaggagtttaagacaagcctgggcaacataggaagactcaatctccacaaaatttaaaaaatctctacaaaaatttaaaaattagcagtgtgtggtggtgcatgcctgtggtcccagctactcaggaagctgaggctggaggatctcctgagcccggcagttcaaggctgctagaaaaaaacaaaataaaaatagaatgggatagagattttttattgttattgttcatttttctttaagtttttaattgcctattaaaatatatctgtgactttaagtccaaatatgaaacaaaccaaatgaagcatacttttaagcaattaataaagaggaagaagaaagaccatttgaccttagtgttgggaacagccggttgtggtacaggagtgaggtagctggacccagggagagtgacgtgcagccctactctccatagcacaacacttctttaaaccattgcgtgatccccctgtcttttcccttactgtctgcatctcacccctcactcccaggggactcctcctgtctgttcatcacagtaacttcagcagctggagcaccacctggcacttttcaatgcataaatgagtgcttatactgccttaatattacaaacattgtttattagatttcaattttagaaacacagttgggcaaagaatgggagacttaatagaggtggaaagatgtactaaggcccggcctggtggctcaagcctgtaatcctagcatttgagaggctgaggagggcagattgcctgagctcaggagttcgaggccagcctgggcaacacactgaaaacccacctctactaaaatacaaaaaatttgccaggcatggtggcatgcacctgtagtcccagctactcaggaggctgaggcaggagaattgctagaaccccagaggtggaggttgcagggagccgagatggtaccactgcactccagcctgggtgacagagtgacactccgtctccaaaacaaaaacaaacaaacaaataaaaaaacccaagatgtattaaagtgtgaatggccttcagatgtaaaagtagaaacatggctgatgaaggatggatcctggagggggaggctggagttgatggaaaaggcaaagaaaatgttagaagttctgagattctcatccagaaagtggagggcagagaactcctggagcaagcaatagcgctgaattatatttaaagttaaattaattcaagctgttggccgttatgaataatgctgctatggacgtttacttacatgtcttttcgtagacatgtgttttaattatcttgggtaaattcctgtaaatggaaatgtctagaaaaggcaaatgtatggagacagaaagcagagtggtgcttggctactgttgggatggaagtgatgttggctttaaatgggtaggagaacatttctaggatgtcagggatgttctgaaactagattgtggtgatggttgcacagctctataaattaccaacaccattgaattgcacacttacaattttatggcatagaaattatatctcaatattatattttaaaaatataataagtaaaacttctaaaagaaaattataggagaataaccttatgacttgggcataggcagacacttcacacatacacatgcacacacagacacacacacaaacacaagtgccaataaacacacaaaaaaacacttaacatcattaagtcatcagggaactgcaaattaaaactataatgagacacaactaccagaacagtaagatatcagcaaagatattgaggaactagaattctgaagcattattaatgggaacataaagtcatacattcactttggaaaaatgttctggtggtttcttataaagctaaatacacacaacatttctgcttctaggtgcatatctgcaagaaataaaaacatatgtctgccaataacatacttgtacaagtatgtttctagcagctttatttatgatgagcaaaaactcatggaaacaggccatgagtccatcagtaaacaaccagatagacaattgacataggcagtgtcatgaaccatctcaaaaaacattatgctgagtgaaaaagaaatgctgtttataaaacattatttattttacagattctttctgtatgagttatggaacaaggaaaactaatctaccatggaacaaatctgaacagtcattgtctctgtgctggggacagtgtagggacgtggagaaaaccctggggcagtggtaatgttcagtacctcgacagaggcttcggctacacaggaatatgtgtttgtcaaaactcatttgagagtacacttaagatccgtgtattgaattttatacacatttcatttcaaaaagataaagaaggaaaaggattgccctgagaatgagagtggtattgactataaatgggtatgggaaagttttttttgtttgtttgttttgttttttttgagacagagtctctctctgtcaccaggctggagtgcagtggcatgatctcagctcactgcagtctccacttcctgggttcaagcaattcccctgcctcaccgtggggtggtggaatgttctaagactggattgtggtgatgactgcgtggctgactgaactctggatcagtattgcaggctgaagtgttgacaggtggagtgcactgatgtctccaacttactttgaaactcatcaaaaattaatatggattgatgacagaggcacagacaaatgaaaagatgtgcgataaagcaagtagagtaagatgttgatgaaataatctatgtggtgtgagtatgggtgttctctgtgaaattctttgaactttgtgtatgtttgaaaagagtcataataaaatgtggggaacaatgtaatcaagggaagagctaaaaataatacaactattaaacataaagaagagaaacagaggaagaggtactggtgagctaagtccttatttcttatttttgagagtcaatagatattctctaaatttaataaatcttttaaattatttttatttttttcttttttcttagagtcatggtctcactgtcacccaggctggagtgcagtactgtcatcacagttcactgtagcctcaacctcccaggctcaagcaattctcctgcctcagcctctcgagtcattagaactacaggtgcacatcatcttgcctagctaatgtttcaaaagtcttttttctttgtagagaaaaggacttgctatattgcctagtctggccttgaacttctggcttcaagcgatcctccagccccagcctcccaaagtgctgggattacaagtgtaagcaactgtgcctggcctcaatttaataaatcaatacagatatacattcatattatttcacacaatggaggtaaagaacaaaggaaataagacagaaactatctaaagaaattatctctgagacataagatgggggaagtgcattaaatttggctttcataataaccttttgaattttttttaccattcaatgtattactttgataaaaaaaaaaaaaaaagaacacacagaaaatgtctctgagcccacagacacattcatcagctaaaggactgccgaggaccttagcccaaagctctctgcccactctctgggtctgagtgattgacgatgtcgggagtgtcactgctggaaggaattcaggatcagaaccactttcatcttgtgtcaggagtctgaactccatggctgtctggtgtctgccaggtgaagtgcacagctaaatgtgttcagattattccagaatgggtcattattggagtggggaaaacaagtgcccacacacagttgaagcacacgctgggtttttactgattcccaaagttattcccttccttccaaaatacaatagtttgatccctctatagtttataagtgtgatgattgggtttcatactcatgtgtgagatgtgcctccctcaaaccctctcatgccaccagcacataacccatcccatgtgaagtagaataagacaggttgcacaacatggcaatttgaaagttagtcatcatctcaatgcaagcagatgggagagaccaaggtgccttgcacttgaccctactaggagatttaatctcattgcaatggaagaagatggctctcatctgaattgtctgcttctatacttgatggtactctgtgtgctgagaacctgtttcttgccaagtgctctgtggctctaagggctggagattctttgatttcaaaatttcctaagtccagtgcttctggttgaggttggctgctttccatagcatctaggaactacattcccatggacaatcaccatttatccatccagccatccatccagccacttatctaacaaatactaacagaatacggcacatggcgctcattctaggagctcaaaaaattgctgtagacaaggatggacaagatccttgcccttgtgtgctgactttcagttatttagagcctctatagatacatgtttgaatgtcacgaagtaatttatcagggttgcctaggttaaaaactgattgaggtggagaagatatggtggcaagagaagaactcttcggggaggtggcattttatctgggacagaaggttgaggattcagctatgaggaaagtatgagagagtatattccaggtgacggggaccacaagaacaaagccctggaatcagaaggagcttgatgtgtttgagaaacaaaataaaggccactgtggctgaattttggtcacatgagatgaggtagaggaggagatttgggacaggtcttttaggaccaaacagatcttggtaagaaatttggattttattctcatttgaatgagaagtcatctcatttgaatgagagggttttaagcaggaaagtgacttaacagaatgtgtattttaaaaagatgattctggatgcactgtggagaatggaagacaggaggatatggatgaaaactgaggactgttttagactttcagggcgaggcaacagtggcctgaatgcctatggtggtgatagagatggagggatgtggaataatttgagatgccatgacactgtttttccaattatttttttgccaaatctgccattactgcacctttgggatggaagtcactcagtgtggtgtttccttcagtgaatcccgtctagtattccctgggtccactctggaaggagatattggtctgccatgcttttgggaaccagatagcttgcttggggctacagcatagctggaggacacttcctcattacctacaaattgtcctcagtacttagaaactgtcacatcaggccaaccacttggatctttcccagctctaatcagaccctgcccccctccatctcctggttctattttcactacttgaccacactcttggggagtccaccccagaggccttactgcctaagacaagataatttcccttttcccagttctagaaaaatgtgtgggattggtccatagtagactgacctatttaacatgcacgctccagaaccagccacaagggtcaggggaatggcacagctgttgtcttgagtcagctgtcaactgctcaagctggtgtgtacaggaaggagctgggcaccagacccacgttgtctgagaccaacaggaggatgattcttcaaggcaaattgagatgctggcagcagcagaagggagaatagatggccggaaggcaatcacaatgagatctctgaagtatctttcaagctgtggctcccaagctctctcttccaggaaccattctatatctagtctgccttggagaaccagcttcatcatacagtggactttctcgtcaaggggaaatgcagacaaatcttgtcagtgaccaggtccgatctttcagggaagtcttgcaagagcctaacccatggtctacaggtttctgtgcatgcactgtgaacaagctcccactggtaaagaccgcacccagtgttgctgtttcaaaaagttccaggaagaatctcagccctggaaaacaaaaatgagtttgacccagagatgcctgagttggagatgaactttgaagaactacccttgttagcatactgaaatctccacccagggaggagctcatgcaccgttttctgtacatgtgaggtatgtggaacatgatcagtgatgggctttaatccatctccacattcaatgactcagctcaataaaagccaggctttcacctttgttctgggaggcactgcttgggaactatccctgatgtcctccttacttgctgcaaggcatcaaatccccctgttatacctgccttggctgtcgtcattggacgtcacctgccaagccattgaacccacctgtcatgtgggtaacaaaatgagaaacaaacaataggtctgattgtctgactgatcatctgaagacatggtatgaagatatttattcaacacataattttaggtgtataccctggacctggagctgtgcaaagtgtgtgagacccaaaggtccttcacactcacgtgacctcagaaagagcccatgcctgcctcatggacagagcacagcacaggcacagacgggcgctcagtggaagttgtgagtaaataaatgacagcttagcacacgcgtcggtctgaaagaggcagtgaagttaagtgatggatagaaatcgctgttctcagagccctcagaaacgctcttctcacagccatgcctccaatcagtcactgtaggctccttctgcctacagaaatgaagcctggtttcttcacctgggaacacaccccagatggaggtcccttggcatcactggtatgaggccccctgcccagtgtagctccctggtttgtccaaatcctgctcactttttaagactcagctgcaggaagcctcgttccctgcaccaagttccactgtgtcgcctcctgcctgtgcacttccactacgtgcgctcctgcctgggcctcctgccttgtgttcctgctgacaccccctgtcactctccctgccacctgcattacggaggacccagtgctcacctgcctctcactcaggatctcaagcacttgagagcagaggctggcctcctgcagccctggccaagaccctcccaccgaagacacagacgatgctctcaccaggtccccactgggcttgattgctttattttactcttagaaacagtgtttcctttaaaatgcccaaattgggccaggcgtggtggctcacgcctgtaatcccagcactttggcaggccaaggcgggcggatcacgaggtcaggagatcgagaccatcctggctaacatggtgaaaccccgtctctactaaaaacacaaaaaattagccgggtgtggtggcgggcgcctgtagtcccagctactcggaaggctgaggcaggagaaaggcgtgaacctgggaggcggagcttgcagtgagccgagttggcgccactgcactccacctaggcgagagtgtaagactccgtctcaataaaaaagcccaaattgtgtcagttgatgcagtctttcaaatgctattatgctgaatatttggtagcagcaaatactcaggctctaatctgaaaagacatcattatcatgaatgcctgttcttaatcagtatggactggggcaaatggctctgcagagttttctggattttagggttaagctcctggtctgctggggagaggatggggccaaggagagggtgaaaaagagtccagctatgcttcaatgagtcacttcaatgttatttggttcattgaggttttattggggaaatacttatcatcaacagccagagagacttttggaaaaaacatgcaagtgattgatgaattttcaaaaagaaaaaaaaaagagtatgatgaagaaaatgacaccaggatgtgcatccttgctggcaggaggtctagggtttcaactcacacaccagatcttactgattgaaaatggcaaatatgccaggcgcggtgtctcacgcctgtaatctcagcactttgggaggctgaggcaggtggatcacttgaggtcaggagtttgagaccagcctggccaacatggtgaaaccctgtctctactaataataaaaaaattagccaagcatggtggcccctgcctgtaatcccagctacttgggaggctgaggcaggaaaatcacctgaacctgggaggcagaggttccagtgagcagagatcgcaccactgcactccagcctgggctacagagctggattctgtctcaaagaaacaaaacaaaacaacaacaacaaaaaaaacaaaagaaagcagcaaacaaatattccatgactgactagtgatgtctgccatggttgtggaatagacaaatgaagacaaaaagaaattcaactacatcattaaacaacaaagagtattaatccatcaaaaaagcctatgagaaaaaaaaagccttcacttataaattcttctctaaaacaaagtatgttttatgttggagagcggcacatggtttctattgaggttgctcagatgaagagagaattctgaagctgctggtagccatcttgtcaccaagaggcaagaagctagctgaaagtgaagacaaatcaaggaaatcagagccaagagacagagagagactaatttctaatgatgtcctttccaaacctggacctagctatcctcttggtcaaaaagatctacccttggtctttagttacataagcttattttttctctgtttacttaaactaatatgaattgggtttacgttatttgctacccaaagaatcctaatagatttattaaaagagccgagagggaaatatcttgtaggaagatcacttaatttcttttgaatttgagtggtcttatctgtcagtggaaaataatgaacttacctgtatttgtttaataggattgcagtagaaaccagccaggataaaagatgtcagagttcttggaaaaatgtacatgaaatttcaaaaattaaattccagcaggatatgtgagtgtgtgtatgtatgagtgtgatttgtgtgtattctaaggaagaggactaggtgatgtgtatttcagatgaggtagataatccactaccttctgtttttgatttaggttttggaaaccctgatccataaaaacatgctgctatgtatgttattcctgccacatccaccaaagccaggaaattcttttctttgtggaatccacttttccaatggaatttcctatatgattgaacactttgattatatatgtattttttttttgatggagtcttgcgctgttgcccaggctggagtgcagtggtgtgatctcagctcactgcaacctctacctcccgggttcaagcgattctccccactaagtctccagagtagcagggattacaggcacccactaccatgcctggataattttgggatttttaatagagacagggtttcaccgtgttggccaggcttgtctcaaactcttgacctcaggtgatccaccagccttgggctcccaaagtgctgggatttcaggcttgagcccctgcacctagccagattacatatgtatttttgattatgattttcttacagcatcctgaaactttgaacttagtgatttattcatgttgcctgcaatgccccctgtttagcactgcaatgctctggcagtgttatgggctatcccccaaaaattcataacagcatgtgactgcattgggagacagggtctttaaagaggtaagctgaaatgaggttactagggtggaccctaatccattataactggtgtctttataggaagagaaaatttggacacacagggagaaaaccacagggaggagatggccatctacaattccagaaaagcagcctcagaagaaaccaatctgcaaacatctttatctgcaactccctgcctcccaaatggtgagaaaattaatttctgctttttaagccaaccagactgcaggactttgttatggcagccccagaaaattaatacagacagcaaacggccagatgtcccacttgaaaaatggatccaggaacagaaaagtaaatgttgtgagaatgacgtttgatggcagggttttattctgcagttgcctacaggaatgacaacagaaaacttaagatggtatgttccaaaataagctctgtagaaaaccagtgtgactgctactttaaagaaaaattgaggagtgttttacttccagttatgtggtaaattttagaataagtgcgatgtggtgctgagaagaatgtatattctgttgatttagggtggaaagttctgtagatgtctattaggtccacttggtccagaactgagttcaagtcctgaatatccttgttaattttgtgtctcattgatctgtctaatattgacagtgaggtgttaaaatctcctactattattatgtgggagtctaagtctctttgtagatctctaagaacttgctttatgaatctgggtgttcctatattgggtgcatatatatttagcatagttagctcttcttgttgcattgatccctttaccattatgcaatggtcttccttgtctcttttgatccttgttggtttaaagtctcttttatcggagactaggaatgcaactcctgcttttttttgctttccatttgcttggtaaatattcctccatccctttattttgagcctatgtgtgtctttgcacatgagatgggtctcctgaatacagcacacagatgggtcttgactctttatccaatttgcccgtctgtgtcttttaattggggcatttagcctatttacatttaaggttaatattattatgtgtgaatttgatcctgtcattatgatgctagctggttattttgcccgttagttgatgcagtttcttcatagtgtcaatgttctttacaatttggtatgtttttgcagtggctggtgccagttgttcctttccatgtttagtgcttccttcaggagctcttataagacaggcctggtggtgaccaaatctctcagtatttgcttgtctgtgaaggattttatttctcctttgcttatgaagcttagtttggctggatatgaaattctgggttgaaaattcttttctttaagaatgttgaatattggcccccactctcttctggcttgttgggtttctgccaaaatatccactgttaatccgataagcttccctttgtaggtaactcgacctttctctctggctgcccttagcattttttccttcatttcaaccttggtgaatctgacgattatgtgtcttggggctgctcttctcaaagagtatctttgtgatgttctctgtatttcctgaatttgaatgttggcttgtcttgctaggttggggaagttctcctggataatatcctgaatagtgttttccaacttggttccattctccccgtcactttcaggtacaccaatcaaatgtacatttggtcttttcacatagtcccacattccttggaggccttgttcgtttcttttcattcttttttctctaatcttgtcttatcactttatttcattgagttgatcttcaatctctgatgtcctttcttccgcttggtcgatttggctattgatacttgtgtatgcttcatgaagttcttgtgctgtgtttttcagctccttcaggtcatttatgttcttctctaagctggttattctagttagcaattagtctagccttttttcaaggttcttagcttccttgcattgggttagaacgtgctcctttagcttggatgagtttgttattacctgtcttctgaagccgacttctgtcaattcatcaaactcattctccatccagttttgttcccttgccagcgaggagttgtgatcctttggaggagaagaggcctactggtttttggaatttttagcctttttgtgctggtttctccccatcttcgtggatttatctacctttggtctctgatgttggtgacctttggatgaggcctatgagtggacgtcctttttgttgatgtcgatgctattcctttgtgtttgttagtttccttctaacaggcccctctgctgcaggtctgctggagtttgctggaggtctgctgcagaccttgtttgcctgggtatcaccagcagaggctgaagaacagcaaagtttgggaaagtttacacactctaatgccctgctacccagcctttaaaaactgatttaaagattttaggaatcctagagaaaaacaaaccagtagtatcttattacaaagagagaaaagtgaatagtccatggcctcaataaacagtctttagcctgcagctgaactggcattccatggagcacactttctgacatgcatactcagtggttccttcaatgtgcagaaagtcagctggaaggggagttgagtttcaatgagaagtgaagcatgtcatgcatgggcagccagcaggaccccataagtctgcatgaaaatgctgcccagagcacaatttgcaattgcaaatatatggaaccagcccaaatgtccatcaatcaacaagtggataaaggaaatgtggtatgtgtgtgtgtgtgtgtatatatatatgtatatatatacatacatatatatatacacacacacacatatgttacataatacacacacacacacacaccatggagtactactcagcaataaaaaggaatgaaataatagcattggcagcaatctagatggaattggagactattattctaagtgaagtaactcaggaatggaaaagcaaacattgtatgttctcacttccaagtgggagctaagctatgaggacacaaaggcataagaatgatacatcggactttggggactcaggagaaagggtgggagggggtgagggataaaagactacacactgggtacagtgtacactgcttgggtgatgggtgaacctaaatctcacaaatcaccactaaataacttattcatgtaaccacacaccacttgctctctaagaacctattgaaataaaaaataaattaaaaaaaaagaaaaagattgcttttcagaatggagagggcacatttcaataattagcacagatgttaacagcagctcatacctgccacacagacaggaaattgcaacttctgtgtactggagctttgttcataactgttgtcagggttaacaaagtacctgcttaattattggtagctgggaatacctggggttgtgctcacgtgttcataggctttgtattcctcagagctcagagacgaccatgctcatgtgagaaacggcatggcgtgttggtagaggggagcaaagagggaggctgggggagcaggttgagaccagatgctgcaaagacaggaatcaccctcaagaggccggacttgctctggcagggagttgggagatgatgaaagacactgaggtgtaagggtggcctttggtttttaatcaaaaagaagcccatgccagcatctaactaagatcatagcaccaagggaaggaatgggaagcaggggagctagagagcaggtatagtaggagaaagttctgacccaaaggctttggccaggtttggggaatgcagagaaattcagggatgaacaggttctttgtggtttggtgggacagagaggaggatgcattgcctgtcacttgatcagggagtcaaaggagagcagagtttggaccaagagagttctacattaaacgccaagtgcttatgaatcagagtgagagtctcccttgctgaatctgcctcttttatcttggctgttccacaacatagattccattgtacaaatgatcatatagacattgtgtgatgttctaagccaaaaagtgactctggcagttccagcctgtgagtatcttttggcaacgttctagtgtgagaaggagttcctgtgcagcactgtctgtctgactcagctctgcaggaacggctggaaccacagagctcatgagggtacactgctcacaggcagggctcacacacactctgaacccagctcccacgcctgagcaggtcacaccaactttgaggcacttccccggccctaacatgttttaaaatttgaatcatgcttcaagtgactcttttgagattggcagtgatggaaacagtctaaggaagggaacttagttttaaaatagttttaattgtagagatgacaattgacacagatgtgtcaggaaaacatgttggaatgtctcgactggcagtggtaattctgtgagctcagttcacattccaagtgctctggcttctgacttctggcatttaggaacctgagaaacatatgaatctatgcacacgaaaaatccaggcactaagaactcagccttgattagccataagtgtgctctctgtagaaggggaaaataacattgtaaggaatatgtttaacctatgtaagaaaatacatgattttaacatgaaatataaaaattggtggcattaattgtagtcttttttatcagtccattgaagttggctcagcaggctctgtttctcccactcttctctggcatcacatttaattgttatgtgtagtgtaaggtctgcagaatgaaacagtcctccttttcaaatagtgtctaatgtgaacctcagtgatccagactggcctctgagaagattgaagagttttcgaggacaacgatgtcttgaacgagccacaaggaacactccaactttgtttttagatgaatttccacgtttttcttctgcaagggtttcggagaggtagcatgacagacttctttgtacagaatgttttcagaagttgtgttaatggagaagtttcttttggggcttaagtttctatttaccttttgtgacatggtttttaaaaaacagcaaaacaacctcattatcttcctctcccacaatcgttgccgtagaaaggagataaggcagatcccacgtggactggtggctgggtgcgctgccaggatagctaaggcgccccttttacaaacagtctttgacatgcagtcacacccgcaatctcggtgctgggtgataagaaggattgtattcattacaccgttgaatacagaaacatatttctgaaataatttttcttgtctagaattccgcagaattccgctgagtggcacattcaaaagaatttttattaggagggttccaatgaactgctcagcggcagagggactttatatttaatttgatttctcagaaccaggtattgtggagaaaggcatcagataaccacggagtgctggttaagggagggaagcctcactaagcagggttcatgcgttcaagccccgcagccaacaagcattctctgagactctcattctggagtgggcaccaaggtgcctcgaaatcccagtgggttcatgaggcttcccgcctcttgtctccttgcatttggttacagagatggcacagtatttgttattgaggctggatgaaaatcaactgtggccagaccttcacaacccacgtatgggcacaggacttgggtgtagagagaaaccaagtgaaaagtttgtagtaaaaattttgccactgtggagaattccccttttctcattttgctttggcataaacaaagatcttaaaaaacagtttaacagcacgttgggaggctgaggcgggcagatctcttgaagtcgggagttcgagaccagcctggtcaacatgatgaaaccctgtctctaccaaaaatacaaaagttagcttggggtggtggcatgtacctgtaatcccagctactcaggaggctgaagcaggagaatcgcttgaacccaggagatgggggctgcagtgagctgagatcgtgccactgcactccagcctggatgacagagcaagactccatctcaaaaacaacaacaacaacaaaaaagtttaaaatactagaaagtcccatgagactatcgtgagcacctttgcagaaaaacaatctagtggtagactctgaggctggtcagtagtgggttaatggtggcccctaaaacaatatggccacgtcctaatctctagagcctgtgggtgtgatcttatttgcaaaaagtcttcacagatgtaactgagttaagggtctcaagagaagtagatcattttggtttaatttatgggccataaatcccaggataacagacgcagaagaaatgagggccattgaaagtggaggcagagactggagagaagctgccccaagccaaggggcacctggagccaccagaatctgaaagaggaagaaagagttcttttctagagccttgggagggagcatggccctgccaacatccagcttctggtgcccagagctttgacagatcacacttctgtcactgaagccacgaactgtgtaagaattatccaacagcagtctccaagggtgcaatggttgagtctgcaaatcacatttgagagtcagaggatgtcagagctggaaggggtctcagtctctgcttaaagagaagatgttggacaagctactcccttggacctgaattctaggcctgccctgacactcacaggctaagtgctttttcgagaagctggtggatccttttttccaagttgctctggcttagtctagaaagctctcaggatctgaccccaattgcctccctctgtaacctcaccttccacccccaccttctggccctccggccacaggaactcttctgaacatgttctgatcctgctgttcatatacttgtctctatatcaggctgagagagggacaaggcatcctttaaacccagattcctgtccgggggccttgccctgatcctccagctggggtcgctcttccccctgctccctctgtgcattgtacgcactgtggattctgaccacactttagggctactcacgaggcccagcagacctgcagggtctgcctccaaccttcctcctagagtgacctctcatcactcccactgcagcccctcagatgcacctggacccctcctgccacggggccttcgcacacgctgtgctttccctaaagtcctctactcctgtttgcaatggccttggattatagttaaaatgttccatatctttgttgggttatttgttcaatgtctgtgtcttcactcggcagcaagccctgtggggcatagattatgctggattttctcctggtgtagagcccagtacatagcagatctaacaagcaaagactgtgggtgactatatgttagatctataaagatgatactccacaactttaggagctcctcaagggtagggacttgttaattttatatctctggtatttaatagagaacctttgtagaaaccataaactttgatgcaccaaagtctctagaggccaggcacagtggctcacacttgtcatcccagcactttgggaggccgaggtgggaggatggcttgaggccaggagttggagaccagcctgggcaacataatgagactccatctctacaattttttttttgaattattcgggcatggtagcatgtgcttgtagccccagctactcaggagactgaggtaggaggactgcttgaacccaggagttcaagggtgcagtgagccatgattgtgcctctgctctacagcctggggaatagagcaaggctctgcctctttaaaaacagaaacaaaaacaaaacaaaaaaacaaaaaaacaaaaaaaaaaaaaaagaagtcaccatctgtgaagagcttcttcttgccctttagatatgacaccaacttctactgcatctataaaccctcatgttccctctgctcctttagtttccaacctcatctcttgcactttcctttctgccagtcctgcttggcaaggccttcagcttttcacacactggcctctgccctgcttggggccttgagcaggctcttccctccccttggaactcttttccattcctttccctgcctctttgtgtcctggttgattcccagctgtcttttcagtctttgaatatcacttcctcagagaaagctttgctgaccttccagtctagcttctggtggctagtgaccaccatctagttttcctgcatggtttacagaactcctagcatgctttggcatgcatgtcttctgttgaatgcatgccttccataagctcacaaagctaggcagagctggatggtggctgtctgatttcaaagatctctactcttggcacttcattacccaaccctccctgaaggaagggaagtgaaagaaacagaaaagcagaaagaatgcatgaagactctgtggaagagggccactgtaatgacttccaaagcccctgtgggctttctccctacctggcaggagaagcacactgtgccccggagagctcagggaggaggcaggacgctaggcatgactttggtgtgaccctgggttgtctcccagcctcctccctggcccatccacagcccctgcttgccatagagccaagtagcttccttatgcagtaggaactgttatccccatttaccagagaagcaagccaaggtgagcaatggacagacctggagctgccagcatgatcgtgtggttgcaaaccccgagctccttccaataaccgtgtgtcttataaataacggcgatggtgtgagctgtgtccagcacccctgaaaaaaatgccctagagacagtgctgtcaaatggatagacaagtagacagacagacaggaaatcatccctttgctaccacccaagacgttgcttcctctcagtctatttcccaaatcctcctctcccgcaccccataatcttgtcagagcttacctcctccctacgctctgcactttcattaatttcttatcacctatccctcagctgtaatctaggactttgtaaggacaattaattaaagtgagaaggttcttaaaaaaaggtattgacctgcaattcagccctttctttcagcaaaatcaatcttcagattacaggtcaagaggagacatctttaaaaacgtgtccagccaatcggttcttcagatgcgttcatgaagtcacacctgctgtgtatgaacctgattgcatgtcctgctttctgcctaagaaaagcacgcctaagtacacatgggcgtgcagcttgtttgaagaatctgttgctatagaaagataaaagggaagaaaaagataaaatatgtataaaaggaaaaagcctctattgatttatctatctatccattatatatatatgcacttctggtccttaatcctgggcagggtgtctgctgtcagagatgggcaaggatgggtgtcagccattggagagctgttccagggagggagcccgaccactctctggccttagccagcccagtcagcactggagaaagacctcatccaacgctgaaatagatggtgctagtgtatgcattacaatagcaggtgagtaaaactgtctgttgtacaacatgctgatgtaggagctttgtgattatctagcctaatgtgtagataaggaaatcagggccctggcaggtcgctaggcatgactttggtgtgaccctgggttgtctcccagcctcctccctggcccagggctcggtcttgctgtatgtggtccattcccaaaactgaaattcaggacctctgtcacccaggctgggctctgtccaagacaagctgccatttctcagaggagaaattgagagaagcagccaggcatcttcctgtctgaccccaacactggggttctaatctcccctaagctcacacagcaactccccaaccacttttgcagagagaacaaaaagacagatgttgatttacccggagagcatctgtcactaatagtaacacgcggctttcactgagggttaactgtatccaggtgtggttcttatcttcttacaagtattagtgcatttacaaataaagtgtgggaggcttagaaagttcaagtggcttgtctcagctcacagagcaagtcaaagttggaaccagaattctgggattagtcctgtgttgccaacaattctttattgcctcaacagacaaggttaacattaatttgaattacttgagctaagctgaatgacttgattcctgttccttacattgatgtggatgccaagcctgtgcctgaccattgccaggagcttaagggcagagataatggaacaaagagaagtgtatggcagcagagtacagtgaacaaaatttcccgcttaggttaaacggtggcacagttgtgttctgccgcatctcgagaaaagttacttaggctccgtgatcatcagttttcttatctctaaaatgggcatagtaggattaacctcttagggttcccagggatcttgggttagtctgcacacatttccaggaacatgccaggcacctggggagcagcacagctccttcacaaggtcctccatcatcatgaatggatgttagtaatcatgactgacacagatgctgcctaagggatgatgatggtggtgatggtggtgatgaaggtgtggttacgctgctgctgtgacgatgggatgacagcaaggatgcagaagaaagaacacggctctgccatgtcaggaccatttaggtcagtggttccgaactaggagtgatttcacccacaggggatgtttggcaatgcctggagacacttttagttgttcacactgttgagggaggtgctattggaatacagtgggtgggggccagggaccttgttaaccaccctgcaatgcataggaaagcccctgcaagaaagaatgatccagccaaaatgtccgtggggcccaggtcaaaaggccctggtctacgaggacgggaaatctgaacactggaggtgagtgacaaagcttccaggagccttgttgactacttaacatgcctctttcagctactgctttgaactgtacaggaatctgcgcctaaaaggaagagggcagaatgcccgacagttgggaagactatagtgaagccattccgcgggacctcctccctctacttgcagggcggcctggtgcagctgcgtctccagcccctccaagtccacgtggaaactgtcccctggttttctggatgtgcaagaaggcgtctgctggagcagtcttgctctcccaagcctctcacgctgtcatgggtgcacagaagcagtgggggagggggagggcatgggaggaggagagccacccataaatgaaagaacagtggagcatcgatcagcgctttttcgcagcgcgggagctgcttcgctgagccccagcaccgtcagacagacccctgattaaacatatgcagctgcacggatggatggccctgctcagctcccatcagcaactctgccagaaaggaagaggcaccacggaagttgtgaaggggcccagggctggcggctgggtatctggagggctggcaccctcttccttccaccagagctggctccaaattccagactcaaagcagaaagtttattctatgtttttccaggagatggggcaggttggagatgagagcaaggggaaggcgcgattccctgggaatgccctgttgttttcctctctgggaggccttggggtgcaggttccagatactgccctggttcttgttatagggacatggtgagtcctcaccaaattccaaatgcctccacagagagggaggctccgtgtggtaatgaagcctgctctgttcatttcgtcatttggaattctcttggatggcctgtgagttttctattatagaatcaaaaccacattttcttaaaacatgagaggctgtggtctattctgcctgagatccccatgtgatgccagaggagccacaactcacaggccctgcatcacctgctgctgtgtgcggatgaggaagtctgtcttcctggagggggttcttatgagcacaaacagtgatgaacgacgttaaatgcatgatggaaaactaagccaccacagaaagctggctgctcaccccacagaggcacagaaagctggctgctaaccccacagaggcacagaaagctggctgctcaccccacagaggcacagaaagctggctgctcaccccacagagggagagcactttgtggacaagacctgattcttccttccttccttccttccttccttccttccttccttccttccttccttccttgcttccttccttcctttctttttctttctctctctcctttctttttctttctttctctttctttcttcctttctttctccctttctttctctttcttcctttcttccttccttctttttctttctttctctctttctttccttctttctttctttcagcaaaatctcactgtcactcaggctagagtgcagtggtgggatcacagctcactgcaacctcgacctcctaggctcaagcagttctcctgcctcagccttctgagcagctgggagtacaggtgcacaacacctcacaaagtttattttttaaagtgtttggtagagacagggtcttgctgtgctgtccaatctggtcttgatctcctggcttcaagcaatgatcccaccttggtctccaaaagtgttgggattacaggtgtgaccgccatgcctggccaagacctgcttcttaatcattgctggagtcgtagagcctcacactgtgccatccatggtaccatagagagaaaggaaagcacttataaatgtgtacattaccaccccagctgcctcccagggaggtgaatccctcatcaggcgccctctgctgagtgagtgatggctatggagatggcggggaggtgaatccctcatcagggccccctgctgagggggtgatgagtatggagatgcaggagaggaggagttggtacagagctgaattttccaacacacaacagaaaaataaatgaaaagtaaggcagtggctaatacagggttggggtggggccaggggaaattgagtggctggcagacgggtagcaggaaaggggaatgacgggggctgcaatgttacagggcaggttctgaagttgtctgacaggcggtgagtgatagagacctttttctgggtctcccagtgaaaactttggtaaacacgtgactgccacttttttaaaaggagcttgcatttgggggctgcaaggttgccgcaaggttagacccgagggtgcccatgggagacctgccacagccaggctgcatgggaagagggcacttgcttcttcccacagctgcgctggtacaccgcagcccctgactcaggtccagagtctgacactgccaggttcaaggttggactttacccctggcccagatctcccacgggctatttattcctatctcctttgaaattcagcaacgtattataccaccttgaagaagatggggcagagcagaggggaggctagagggacaatcccaagcagagtcctaaatctacatcagattttccttttaaccaaaacctacttggtattcagcagaaattttgagtctagtgtttgacataatttaatagtatgcgttaatgactataattttcccctgtagtcgagatactaagaaaatgagaagtgctttatctacaccacacacaacagtaaccaggacagacttggaaatgacagtgaagaacaaagtctgtgagggccaatggcttgtggggaacttcagagacacgcagcactccacgcagaaagcacattccactccagatataagagggtgggaggctcactgatatttgttatgttcttttacactgaccacattgccgggtggtgggtaatactgttcccattgtgctgataccaaagctgaggccagaggggttaagagatggtctatgtccaggaataaaattcagatgtcgtaagttcaatttattttattttattttttatagacagagtcttgctctgttgcctaggcaagagtgcagtggtgcaatcacagctcactgcagcctcaaactcctggcctcaagcaattctcttgctaagcctcctgagtagctaggactacaggcatgcgccaccacacctagttatttttttcatttgttgcagaaacagggtcttgctatgttgaccaggctgatctcaaacttctgacctcaagcagtccttccacctcagcctcctgaaacactgggattacaggccagagccaccatgccaggctatgaagttttattttaagtttcgagatgtggggatttcttttttaaagcagcaagtactacctgaactaaaacgggtgattttgcaacttgctacggattatggaaatagttggcatctatattggtgaggtacccaccaaaactcaaacagaaggaatgccattttggagaacgaatctcaactttaaccttctttcatccgtgggtaagccctgcttttaaaaaatatataaataataataatttatttagggtaagaatacatattacctatcagaaaacatttccttctgtatgttagcttacccaggcaaatgaaaaccttagtaaaaacatttacacctacgtctgtcttctaaactacacctgtgtgtgtgtgtttgtgtgtgtgtgtttgtggggcggggtccaactttctaatgtacaagactctgaggcctggattgtttattgtcgtaaattgagttacttcttcttttggaaaaaatgtaaatgttgtgattacagtcttctttaactttcatgtgtttgacttgcattaattatatattggtagaattaaatgtttcacagtctgaatttggacttttgcgcatcagttgacaagtgttagtagctttctcaggtgcagcaatgcccgcctcctaaaggtccagctcagtaagccagtgtttgtgccactatttatgtgtctgttattttatgcttcaaaaaataaattacaacagaaaaatgaagctgctgatactagtaacaaagatgttggtcccatcactgtaatataattaaggccgagatggaattgatcaatgagcggcatgcataagtctccatctcaatagactttcagatggttgcattataaaggaaaagaactagattcaatgaaatgtgttaaatattgtgcctgaaaggcacaatgtgttcagatattttaagctagttttcagtctctggcaacagagcacatccacccagctgccaccacagctaaaagtataatactatttgttttgaaatgtcttttatgcatgctttcaagaacacattatatacaaaataagtgtttctaatgtgcttcactcttcctgtggcctcccagaggccaaaagccacattcgtagcccagttttcatgactgtagaggccctgaggccctgaatgtcatctcttccccactgctcactcctttaactggtgttatacctcaactctactgaacatttcctttgggccaaatgttttagaactccactgtcttggttcagtataaatttgtgatcttgtcaaatcctcttgtgtagtgaggtggggaacaggtgaaggcgtgggaagatgctgagcatgtatcaggtgctgtgtgagtgaccgtgaatgctgggaggatgctcctgcccattctgccataatggcggaggtggacaagcagacatgggtgtgcagtgagaccacatctacagcacaggtgtgcacaaggtgcctggagacctgcgagaaggatgtgtaaaccagcagctagccaagtgttcctagatagcaaaactcaaagtatcccttcagcatggaatatcatctatctaagaagtaaaaattttcagttgagtttagtgtctggttcagctgacagagcaagcacatatttatttcctgcagtggactgaatgtgccattccaaaattcatatgttgaaatcccaaacccccacatgatggcagtaggaggaggggcctttggaagttaatgagatcatgaggatggatccttcatgaatggattagtgccattatcaaagggaccccagaacactctcttgccttctttctattatgtgaggatccaatggtagctcagcagtctgcgccctggaagaggccctcaccagaacctgagtgtgctggctccctgctctcaggtttctcgcctccagagctgagagaaatgcatatttgttgtgtaagccacagtaatttattatttatgattaccattatttatttatttattttgagttcccaaatgagctaagacattttctctttctctaaacaacaggagtaaagagacagaaagggaatgaatttccaagaagaccagcgtagaacggaaaaatatcagaggagggagaattgttaaggatttccagtatctcaagtgtggatgctgtcctgagctgacccaaggctctggaaaggtaggagctctcttttgggggaagaagggaagaatcccattcctgaatgagcaggtgcagacacttgcaagataagaggcacacacagagatgtttacctgaagaactgcctggtggatggctaagaaagtggccctgcctaacacacacgtacggagagacggagtttgcagcaagacagtgaattatctgcttctcagtggtggcagggccctgtgagtagaatccttacatgtcctcttccatgggcttgtgggataagagcagagcagcctgtaggcctgtccatccccagccttgaggtaaatcccaccagtgaacaagatccacccatccacccagagctccctattagccttgtgagagaatggccagaaataaaacagaaactcctttattcacaaatccctaatttataaatactttgaaacaatgaagaattgccagctgctgtggtaaacagagcacagaagagaggtgagtaaaggttctagttagcactcgctgagcactttgtgctggcacttttctaaagattttgcaaatgttaactgatgtaattctcacatccattctctggggtggttttctttttctttttttttttttttgagatggagtctcgctctgtcgcccaggctggagtgcagtggcgtgatctcggctcactgcaagctccgcctcccgggttcacgccattctcctgcctcagcctcctgagtagctgggactacaggcgcccgccaccacacccggctaattttttgtattttttagtacagacggggtttcaccgtgttggccaggatggtctcgatctcctgacctcgtgatccgcccacctagccctcccgaagtgctgggattacagaggtgagccaccacgcctggcctctggggtggttttcacaaaggaggaaaccaaagcacaaagcctaggtggctcgctctaggtcaacaacaagccaatgccagagctgggatgagaacccaggttctgtgtctgtcatgaacatacactgcgtggctctgaagagaacagagaaagtcaaaaggagataatttcttatagactttaaataatttttccagagaaattcaagaaaacatcacatccatagaaacaaaacaaagccaagttgctatataaaagaaacaatatgtaaatgagaacaaatcattggaaatgaaaaatacgacggccaaaataaaaatgcaattaaaaagttgtagaagtcatcaaatctttcaaagtatagagcaaaacacaaaggaatacaaaagaaaaataaaatttgaggagcactggcaataaatttattgagagggcagtcgccatctaataaatgttctagaaaaagagaagtggaaaaaaattagggaggctactgcagaaaaagaatactgtttcttagaactgaggttctgagagtatctgaggttttagatttaaaatgtccactgatttcttggtagcatgaatacaaaatgacctagacataaacttattcccaggaaatttcaaagcaccaagtgtcaagagaagcttattcacttccagaagtgaaccagaaacttcagactggtacagaaatatttcactgccactagtaggcatgagaaggcagagacatgatgttgtgaagaaaaattattttgagcttgggtatttccaggcttccctgttcttgccatcctgctttgtgccccgggagaccagcagctatgtgttaccttgccctctggctttcagttgggttgtaaggatgagagacaaaagtagaagactgagaggagaaagagaatgaagtcaaagtatgtatcccctccttatgttcctgccagagagttgcagattggctgcctctctctactcaagaccacaggtcaaaccaggaagccctccctgttcatcttctctctctttgggcttgcagtggatctgccatgatccctttgattttcctaaatgttacccacatcttgtaatacccatatctttccttatccaaatttgccctattacatagttaggggaactatctgagacagataaactctgataaagagtgtggaatttcaaatctagaaattcatactctctaaactattaatagagtaagaaatagagatacatgtatattacctatggtcatgaaaataactaaaacgataactaaatataaaattataatgtcaagaaaatgtataaggaagacatgagagggaactagagtagtgtaaagagataagttatttgtctcccaaattcaagtgaggaaagaaaagaagttttataggaggaatgcaagccctttcaaatgatcaggcctagagagacgtgaaaatgagacagcaatcacatcctactcctgcctttaagctatgtattcacctattgaaacagcttgctattgtcacagatagctatgaattaaactaataatgcttcaccagacactgtattccacaccccacagtgtaaagaatgtatagctgatcagagatcagttttatttctgtaaaccaataagaattcctcacagaaccttgcaccaacactctctctgtctcccgttctctctctcctttttttcctttaaaagcctgcctgtaacaaaggccaaataaagctcatatccaaggttacttggacctgaacctcctgggcagctgtccttatcttagaatgtgagctaaagactcacaaggctcacaactttggaaaggagatctttatttctcatgaaggcctgcaacctgcaggctggccatcccacgggctgggaagtgtagcctccagccaaagcccaaagcaagcatgttgagggaggtgtggagggaacaggaatttaggctcaacaggctggctaaacataagtatttaacaagctataggagacatcatgaatatctgtgaaaggagaaacaagcacatgtgcaactgagcttcatgcttcttcatgggtcacatgttttaaaaaatggtgatgttggcatgatctaagagtggatatctgggccctcagatatccaaaaggtgacacagagaaggacacaaaaactctcactaagcatcctccacaaattggccaaaactagtccagagatggtcagtttttaggtggggaagcatcgtgaaactgctgagctgttgggtcaaatgtgtctatgtcaaatgaatccagttgtagcctcagatgactggctaaaggtgattaaaaaatgagttgtctgtttcttgctttctagagctggtttctgtttactccttaggaaggaattctggttaaaggataatgaggaagggacttactgaggcgtgtctgacctcccatcccatcatggccaggaacccagtttttaaggtttatctgggattctcctggccaacaggggaatccgtttagtccactgagggacttaggatttttatttctcagtctcaagtaaactgtttaaatctcattttgcatttcattctcttctttttaggtgggcaaaagagaaaaagtaggagaattcctagaatttatatttagagtaagtgagcagcagtgtcaatgctaaaaaattatatggttatcctaaaaaatttctttctgcaaagctgtggctgagttggtaataaattattaaccactggaaatgacaagatgtgtaaaaccaccctctattttttaaatatttggctattccactcctcccataagcttcctttgtcccaagattaattattctaaaatggttgggccatttctccagaatacagaatatgttagctgtcattattgcagacttgtgaaatagtagcgtttgaatctcttgtctgagcacggctgtgagaggtattcagaggattctgtgggcaggtaatgttttggtttcatgagcaggagcaaaaatccagaaggctttaacacttcagtgcatcccaaggcacccctattgagtattgtatagaggatctcaaaagataacagccacctgaggaaggaaagcagctcatagcagactgagctgtgtgaggtctgcgaaatttatcaggcccagagaggcatgagctttggacttcagtccttcccctgcatccattcccaggggcaattattttaagacatttttgttcctgagtagccgcccagcccattaccttcatgttcctgtaatatatgaagcaaagaacaatgaatagccaattaataacatattatttcaatgtaaactctagaaactatctctttttttccttaaaaactcacttgtaactgctacagtgagagtgtatattcaggacaacttgaatctatgttcccaggtggccatcttcaagctcagataaactctatacttaatcataatttctgaatcccattgtttaaggttggtacaccacaatggcctagcatccttctgttccatgagagcaatagacaccattcaaagggctattcctctccactctctagactctctttgtaccagcaagttaactgttgagcaattctttggtaattaaacaatcattacagcattattagctccacactctggatgacatctttaagcctctctcatgtgttaagcatgtctaatgtgtttttccacttttggataacttaagagaccaaaatataccacctcaaaatatgcctctttggcataagcattattttgagccaactatttttgagaaacagcagacaccggagaaacagagtagaagttactcttttgcaaggaagacttacttctataatgaaaatctccttttgtaatgataccttcctttcagtaccaggaaggaaaggatggctaaatcacaaaagactcatctatggagaaagcaccaatttaaatctgcataacaaacctcacccttttctatcatgctttccctggtcacctccccaggactggcttcccccccagtcttctttctttgttttagatgaagatggtatttaagcctaaattctaagccatttcttttatatttccccttttttcctgagtatctcccatgcacacctaaagaatacatgtcaataaacttctgtttgttttgtcctttttttgtttgtttgttttacaggggatcctagctaaatagaagagtagaggaaaaacgactgtttcaacccttaccgtaatcaactttattgtgataaagattcacatattttgcaatatgtcttatctttatggaaattaaaaaatccaatcacagaatcaaaacttcagaaatatagccaaatataagtggaaatttagtatacaataaatgcaacatctcaaattagtggagaaaaatagaattattaaaaagcagtattggaaaaaccatatacctatatggaacaagataaaattagatctattcattacattcaataccaaaaaattctaaatatatcagatatttaaatgtaaaaaaaagcaacaaaataatttttaaaacttcgatgaacttttctattatctaggaataaagaaatgttttcctaacataaaattttaaaacgtaagagaaatgtttagtaaatttaaataaataaaatatttaagatcttagtatgatcgtgtcagaggcatttgaaccagtgtgactccatcttgagtaggggctgggtaaaataaggctgagacctactgggctgcattcccaggaggctaggcattcttagtcacaggatgagataggaggtcagcacaagatataggtcacaaagaccttgctgataaaacacgttgcagtaaagaagccagccaaattctaccaaaaccaagatggcaatgaaagtgagctctggtcatcctcactgctcattatacactaattataatgcattagcagtctaagggacactcccaccagtgccatgacagtttacaaatgccatggcagtatcaggaagctaccctatattgtctaaaatgggaaggaaccctcagttccaggaattgcccaccccttttctggaaaactcatgaataatccacccctttttagcatataatcaaaaaataactataagtatccttagtccagcagcccaagctgctgctctgcctatggagtagccattctttattcctttacttccttaataaacttgctttcactttactctgtggattcaccttgaattctttattgcttgagatccaagaaccctcttttggggtctggatcaggacccgtttctagtagcaatagaaaaaataagcaaatagtcaaatggcaaaacaggataaaatatttgcaatgtatatttcaggcaataagtgaatatacctactacataaaggactttttaaaatgttggggtggggaactaattactttataatagactagaattatgaacacacattccacagaaacataaacacaaatatctccttaaaatattttgaaaggttaaacttaactcgtaacttggaaatgcatattaaaagtgtactgagttttgtgtcatcagacaaaaaaaaatctaaaagtttgatgacatatttggttggtgattctatgagaaatgggccctctgataaattggcagtgtaagtgcaacgtggcacaacccaggaaaggaaaatttggcaatatatagtaaaaccatgtatatagttatcctttgacccagccatcccacttctaaagaccttgcccaaagatgtactgggaaagaaaaaacaaacaaacatgaaaagccatgttaaaaggctattcactgcagcactattagaaatagcaaaaacccagatgctcaccagtagggagtcggttgtacagagtacagtgcacaacacaactgagtaccatgcagctgtgaaaaggaatgagggatctcttcatacactatatgcagtgacctccagaatattgtcaagagagtcttaaaaaggagagtcatgtgctagtatgctgtcatgtactaaaacagaaaaatacgaaaactaaaaaggggtgatatctatatattcatcaccccctttaatatatagatatagacatagatcaatgtatgtatatatatatacacacacatagataatgcatgtgtgatttccttatattaaaaaaggaaagataaaaatggttactgtatctgccaactatatctacaataatgctacgtgacaaactaccctaaactcactagcttaaaagaatagccatttactcccaagttcccaggctgtgggtcacactgggtttgtcttctttctttgagatgtgagtctagggtccgcaggagaagctttgctttaggctgtgggtcttcaaggcagcaggtggagctctgcttaggtgtctcacttggggacccagctgaaagacagggctaccagaaatgaaactgcctttgcaaagatgatgacagtgagaaaagtctagcatggctgactccatcttgcttccagcctcacaggttggctgtctttgctcattcctgcagaggccaagctaaccacaggaggaatttagtttatagtttaactttgaaggaaggataataacagtctctccctaaaactgattcccccttgtttaggggctgaaaccacctttgtaagactaacaaaaggccacaagattatgggagaagcctgaattctgctaggatatagttgtagtttctataattccttattgctcaggagtcatgtggccagaggtcactagatttgtaacttccccagttgctccaacaataccactattatagaacctaagattggtctcttgatatattttttagacttttgcattctggcaacagactgaccccacctggacttgtgactcataactcaaccggtcctatggcccctacccagaggcagacacagcacatgaggactgttttccacacacctatgatttcatcaccaaccagtcaggggcacccattccctagctcctgcccaataaactatctttgagaaaccctaacctctgagccttcagaaagactgatttaagtagtaacttcagttctcccatgtggtcaacctcgtgttaattatactctttactgcaacttcatagtctcattggactagttttgtctgtgcagtagacaggaagaactcatcgggcaattacagaaacacagtcttcctcatggcagaagcagctcctggaagggttaatagaagcatgacacactaagggttgggtttagaacacacacagtcacttctgcctgcattccactggcaaaatcaagtcatcgggcctggctcaacattagcagggtagggagtacagttctttcatgaaggtagggtaggggaaaggggtgaatatttgtataatgataatataatgtaatataaataggtataaggaaggtagaagattgaaagcaaaatcaatgttcttaattgtaaattcaatgattgacataatccaggggtggtaaactgtgacctgcaggctaattccatcccaggtctctttttgtactgcacatgagctaagaagaggttttacattttttaaaggctttgtggaaaaggaggaagaggagaagaaacagagactatctgtggttcacaaggcctaaaatattaactgtctgactctttacaagaaactatttgatgactcctggcataaccatgcacagaggaaatattctaaatgcttttgaacacaataatttgattgcatattcccagtggaatctactttctgataaaaagaactttaaaaaagaatattaaactgttttccatcatatttttggtattagcaatggtattgttatgagattatcatatatgtaatatagaattaagcaaatgattaaccatgtggtttttttggaaatttgcatttttaacattggggaaaatacagatataagatcaataaggtaaagtaaaaccatgtagtcttgaatttgagttaagagtagcagtgtgacctcattttatattttatcttaacatttttttttcctggatccttgaaaacaatgacaaagcaagtatcctaaaccaatagaaaggtagcccatgttcctggtttggaagactcaattatggttaacatgccgtttctccccaaatttatccaaaattcaatcagtccaattctagcatcaggaatttgcagaaattgacaagcagattctaaaattgatatgaaaatgccaagtacctgaaatattcataataattttttttaaaaaagaaacatttagaggattgacatctgatttgaagacatatataatatgtattgatataaagctgcactaatcgagaaagataatatttgtgtaaaagataaaacaaataaatctatggaacagaataaactatccagaaatagatccacatatgaatgatccaatgatattcaacaaggatgctaaggtaattcaatggagaaaagacagtcttaacagcaattgctgccagaagaactacatatccatatagaaaaaaatattaatctttcctttacaccatataaaagataactcaatgcatcatagacattaacttaaaaactaaaactataaacttctgaaagaaaacctagggaaaaaatctttgcaaccttggagtcggaaagttttttttgataggaaacaaaatgtatacgtttcaaaaatctgctttttgaaagacacctgtgatactggtcttcaacccggttttctgacatacaactctttttgaagattagaatctccaaaatgatgtcttttgtatgctaatgagttgactggtagctgggggaccctaggtagcttcagaatgggggcagttatcagaaagaccaaggcagggttccagggtcaggacttttagccacaccccacaaccactgggaagagaagagatgctgagagttaagttcatcaccaatagccaatgatttaattaatcatgtctatgtaatgaggcttccattaaaacccaaaagaacaaggtttggagagctttgatagcggaacatgtggaggttcctggagggcggtgcgctcagggagaaagtggaagctccacgcctcttccccactacctcgccctatgcatctctttctctttattctttgcaatatcttttataataaactgataaacataagtgtttccctgagttctgtgagccactctagcaaattaattgaacccaaaaagggggttgtgggagccctgatttatatagctagtcattcagaagttctgaaggcccgaacttgcaactggtgactgaagggtgcagtggtccccctcacaggctcagtgactgagctcttaacccatgagatctaaactgtctctaggtaaacagtgttgaatgggaggaggcccagctcctgtccactgcaggcttgattacttgctcactggtggggagaaattcccacacgtttggtcacagaaatcttctgtgttgattattgtgtggaatgacagcagaggagaaacagcttgagtttttccaccttcaacaccatgaagaaaattaaaaggaaagacccagttcaggagaaaatattctttaaacgttcatttgataaggaacttgccttaagaatatatgaagaactcttaaaactcaatttaaaaaaaaaaactttgatttaactttgatttttttttttttttttttttgagatgaggtcttgctccatctcctaggctggagtgcagtggtgcgatctcatgatctcagctcactgaaacctctgcctcctgggttcaagcaattatcctccttcagcctcctaaggagctgggactacagacacatgccaccacgcctggctaatttttgtgcttttagtagagacagggttttgccatgttgcctgggctggtctcaaactcctgtgctcaggtgatccacctgccgcggcctctcatagtgctgggattacaggtgtgagccaccgtgcccagccaaactctaatttttttttaatgagcaatggatttgaatagatactttactaagtaatataataaacagcaagtaagcacattaaaaaacctacaatcagatgatcttcaatgggtgaacagattattagcacatgatggtacatccataccatgaaatcctactcaccaataacaagaaatgaattattgacaaatgcagtaacttggatgaatctccaggtaattctgctaagtgagaaaagccaatccctaaaggtcatagactatataattccttttgttccatattcataaaatgacaaaattatagaaatggagaacagattggtggttgccagggattggggacttgtgggcaggagtcagggaagtgtggctatgaaagggcagcaggggggagccttgtgttaatggacgtgtttggaatcttggctgtgctaatgtcagcttcctggctgtgtattgtactatggctttgtaatgtggtaccatggggcgtaagcagggtaaagggtgcacaggacctttctgtatttattttctaaaacttcatgtgaatctacaattatcttgaaattaaaaatttaattaaaaaaagccttgcacataaaggggaaaaccaaagcatgtgtaataccttccctataggcacactttctcagtggaaccacaaaactgataggggaaagtttcgttttatgagcatattccagctgacaaatgaagaaggtgcgatgagactagactatccccatttggaaccttctgtgaggtgacagattatgatgtaatcattgatggctgttaacatcacacaataaggccttatgaaactcacacagcaccacctctaaagcagtcttgtcacaaaatattaaacctggacctgatcaagcatctggactggcttatggatatagagaaaatgtaggggatagatgagcacgggaaatgtctccgtggggcaaaattcacgaaattcagattgttggacactctccaggacaaaaggtctagattcttcaaaaacaacaacatcgaaaaaaaaaaactgccagaaagaaaaaatacagagggagaaggtaaattaaaagaaacataagagttatacccatcaattacaatgagtgggtctgttttggccccaggttcaaacaaactgtaaaaattttaagagcagccatatgacaattgggaaaatgtgaacactgaccccatgtttgatgttattaaggaattattaatattttaggtgtaaaaaattgtattgtgggtataactttttaaaatcaggtatttgtacctcatttgtacatttgtacgtttgtacattgtacattttgtacaattgtacaaaaacatttgtatagatacatactgaaatatttatagatcaaattataaaaatctgaattggccattcatccataattgttgaagctgggtgatgagaacatggggggtcactatactattctctctacttttgcacatatttgaaatctgtagtaaaatttttattttaggaaacataaacaaagtaatttaatattccccatattggcctctgcaaaaataatatctcatataacttggggagcttggagctttttatgcatggcataaaaatgacaatgtacatccctctccctgcaggacacagaacacatttatgagtcttttcaccctcatttcgttgaagattttattggccgaagaaccctcagtaggcacgaaattcattctcacaagcagagagatgcattatgctccatttattgctcatcctaaattataaacatttccagtgaatgtaaaggaagatatgattgaaaaggactctgtgaagacaggatgtttctgtacagtccttgtatctgctcacctattccaaactttccagagattttaccagaggtttaagatattctcctgagggtttgctgtagagagatttttcttaactaaggagtgcaagtagcaagcaatagcccacccagttggagacaaaaaagaagggtgtcagtgttcccactgttaaaaaacaaaaaaaaatcaccctggacacctctgagaattatacaaggggatgtacacagccctgctttatttgagttcaaaaggaaggtgggttttgaaagaagaacaaggagagtagatctctctggatcttctgatgctcacagcaaagagctcaaggtatctgagtcaactcttgaggcttcttcgaacagagggatgaagagagaatatggcaagcttgccaacagatcccagaagttttaagagaaaagaacagattgctctttgcaaaacaaaccgagctgggtgcatggagccccagtagacagaaagtgaagaaaacatcaacgttctgaagttttagataggtgcaccatcccttatggataccaatctgtgctccccataaacttctgtgcccagggtcaactggccagggacaactggctcaccaggaggcctacatagcctcttcttcaggccctaattacagctctatgcaatagggactctgccatctgacagccaaggaggtggttcggtttctgcacatggttttttccgctgggtcccttgaggtccatggtaacctcttcctcattctctacaggcagatcacactttgtaataagatcagaggcagagaactttgaccagatcacactttataataagatcagaggcaaagaactctgaccagatcacactttataataagatcagaggcagagaactttgacaactatctccttgccctctggccctggggtcagggctactcaaacaacacctgctgtcccaaacccggagaagtgtagattttggcactggtagaggaataacagctattgttgacacttaatcttgtgggcctggaatttcaactatgttttcacaactcggagcctattgctgccacctctgtcagggaagataaatgggcatgaataatagacagatgagtttcccaaaagcccagacaggctgcagggaacacgtaatgagcagacagtgtggttcacgccggggagcccaggtttatccaggcctcatcctcactccctttctctactgataattggacccaacaggaccattccgaatcatttttctctcttcagttattcttcagttctactcaaagggtcagtttagggcataattaaagtcaattactttctgaaaggccatcaggacaactgttagagaaaatgatagcagccccgcacttgctgtaggaattattagcttgtcagcctccaggcttatggagacaaaggatcaaaaagttagagagatccaggtgttcacctatttgttcactaattcttttattgtgagtgtgcatgtgtgtgggtgggtgtgacatttattatgaaccagagggcaggagccagtgacacagtggtgcagagaataatcatattccctgccttcctggggtcatacagcttggtggaggacacagatgtgaattcggtaatcactccaataaatattctcctacagatgaagaaagatgatacgatgtgatggacaacagagacttatatggtggggtctgggctggtctttctgaagctaagactggcaggatgagcaggagtttgccagacaaagaggagtggagttgttttccaaacacatctcagcacaaagtgttgtctttgctgggagctgaaaaaagatagtgtgggcagagaccattaggtgagacgcttgatatgagatacaacctcaacaggtggaagaagatcatgagagatgaagagaggaatatagtacagcagagaggacacagaagctgacgtcagggtgtctcagtttgaaaccagtggccaccctgttcctctcccatgtggtcccatcatgggcctctagggtctgggataagaggttaatgaatatctcataccctaagcaggggtggtccctgcactttagcaaaaagttaaggaactagggaaaagagatggaaataataaagagatgggacaaagactttgaagaccaaagcccctgggctattctcttttttaaatttttttatttaaattttcatttatttttatcaagatagggtctcactatgttgcccaggttggtctcaaacttttggcctaaagcaatcctcccaccttggcctcccaatgtgctgggattacaatgtgagccaccacgtccagcctcctgggatatttctcaatgaaacattggatgccaagattggttttgtgccacatgccaatttcacagaagccagtctatgagccaccagctctactcagcaattacagtttctggaactttggctaaattcctgtagatgcaccactgcttgtggcctgactctttgccacccaagtgcgctcagcctcccctggggagtctgccaggcttgcatggctcccactgcacttgctgtgctgggaccgaaaacagtttttgtgcccctagcttaactccactggattcatagaggctttggcctcctcaatggctgtcctgggacagggaggctggttagcacaattaacacaacctggtcatgcaaggcattgatggtccgtaacatgaactttgaccagtaggagacagagaatggaaaaaagccagcagataaatcatctggccttcctcccctatgacagactgttctgagccacagtgtttcacatgtcttcctggagatgtcccacatgacttgagcaaccagctggagctctggagaaactgtggccatcctggtaacatatgaccttgtatttgctttctctccttcctgctttatttccctatgtcccttactttggttgttgggattgcacctcccaataaagcattagcatgtccgctctgcttggggctctgtttcctgggttaagactctgactcttgaatgctgaggcattgtattgagaaggagttcaggctggactcacacctggtgaacaagagtgctgtggtgcgtgagtgagttcttccacaggtataagaaaagatacttagtacctgccacccctgaactatccttttacggcaaatgtttgcttaaagtcagcagtcccctaaacatacttgagatcacagatgaagcaaaatcagactatctcccaacatagaaaagcacaataggaaagaaatatttggtggtgagaagattatagctataagcaaattaggcaatccatctgtgagacccagcatgcagtatggtagaagttgaaaataaaaacatggataaaattgcttaatggattataataatatgcatgactgtgtgccaggcagtgtactaagactttcttgtttcatcccatttgcttattataacagtactataagacatgcactcttacaaacccttattttacagaggaagaaacaggcccagagaagttgggtaactcatcaaaggtcacagagctaagagtggcagagtcaggcctggagcccaggaagtctggtttcgaatttcatgcttctaacctgagcactgtactgcttggtggagttctctgctagtcctacctttcaggcagaggtgagcattgctgagattacatgcctgttcctgggggctaataccaggagggagattagactgttctgtctaatctgtagtttggctcttccatgagtcttgggatcagaaccctgaatcagagagagatggacactggcctaggcagatgtgatggtctgaatgtgtttcccacaaagcatgtattagaaatgtaatccccaactcaacagtgtcaggaggtggggcttaatgggaggtgtctaggttatgggggctccacactcttgaatggattaatgtccattataaaaggacctgaggctgtgagttccatctcttgctttttctccgtctttcgccctcttgccttctgccacaggtgatgcagcaagaaagctgccaccagatgcagccccttgatctcggactgcccagcctctagaactgtgagccaattaaatttttcctttgtaaattacctagtctctggtatcctgttatagcagcataaacaggctaagatagtaagacagtagggaaacaagctccagatgtacttgaagtctcttgttcttattttaggagttgaagagcaattccctccagtttccattagaaatgcttcttcttccatatcaaatattgtgagatagcctgaaacacctttcaacactttactacccttctccaaaattcaacagatatgatttccacggactttactcacaggggcttcagtagaagaggaagaggcttgggtttaattgaaggtggcctgagacatctgtgaggaacagcccttttagagacatatcccctacaaataaagcatcagaattattatcctaatacatgaacatccatggttccttcagcaccatcgtaatgcagagaccatggggagatgcagggagagggctctgcacagcatggccaacttgccgggttgaaaacagacaacctccatggagcagggacttcaattagttaattccccatccccactgtcacttactaacatgggattctgattaaaaattagattctctgcaagaggcttaacttataatttaagaacttttgctgtataaccattgcaaaaacaattacataaagattaattagcaaattcccaaaacagtagtaaacggcaaagtagtttaattaaaaccattatctccaaaatctgaacgttaataacagttgtagctcagggagaaataagaggcacactggcacagagtggggtaaagggagggtgtccttcgacaccagcattcagtcagcccaagtctccacggctgctgtcctgttaattacactccagaactctgtggccaccgcgtcttgagaggccctgggctcctcctatgagcctctgcagctgtagccttgacgaacttgtcattgctggcctgcctccaacaagaggcctttagccctcagaagagagggaggcagcagggggcacgaacaagacttttaagtggggaattcataaaatttggaattgtcagaaaacatctgtaaccatgactcttgtccttcagaagacactgataaatttaacccaacccagaccccttaacacaaactctgaagtaaaagattggcaaaggaagcccatgagaatgaaatgtaacaatagcaactatgtagttagcacacacaccatatgatctcacacattcacaagatcctcatgaagccacatggccttcattctgttattatttacttatttatttatgagacagggtcccactctgttgccccagttggagtcagtggcacaaggcagtgtgcagtgctcagtgcagcctctaactcctggctcaagtgatcctcctaccccagagtcctgaggggctgggactacaagcacatgccactaagctcagctaattttttttcttttttaattttttgtagagatagggtctgactacattgcccaggctggtctcaaactcctagcctcaaatgatcttcctgcctcagcctctcaaagtgctgggattacatgcgtgagccactgcatgctgccatattatttttattcttaagctaaagtcactcacttagcctcgtgcatggggacccttctctttttaactctaaagcccatttgtttacctggataccacacagatgccctttgtggtgcaacatttagcccattgaaggctaattatgtgagtctcacaattgtgtgagtctgtcatgaagtatagcctagacttgacaatgattgatttctccaaagaaccccttcagcagggagatcccaaatcagagagcccttgcccttacccaggacagccaatgtctctgcagctccacacggagcaccagctaccgtggaggggttgacctgggcctggagtccaggacaggctgaggaatgcccttcccccagccctctccctgagtgtcagtccctgagttagacactgtcacaggagagggcttggaagccaccttctgactcaccacacccatcccagccatgccccctcaccctggcaagcacccaggggctgtatgttgatttgtctctcccctaatacaaggccctgacctccaccagcagagccagactgtctgcctgcaagcctggctttttattctgctgcactacagaaattatgcaaatcacagctattagtataacagcttttgcagaattcagaagaaaaaggcaaaaaaaaaaaaaaaaaccacacaatcacaaaatccctatgtttggttaaaagaccatgaatttccccattgtcctcactcactctcttgtcaatatgagatgtatacatctgaagcctgcttttcagtcttatgaacatctataaaagagacatcagtcagcagaaacctctggtactgcgacatgaaagagaatgagggaaaaacccaactctagccaggatggagaagagaggaaaggcaagatgtgggaggcagccccagaaggcccaggcggggtctctagaggaacctaagaagactctggtgtgggacaaagctccaatgtgctctgagcactctcgctgtccttccagagggcctcgttccccttctcattcatctcactcaccacactggaaggctcctgaaggcagaagctgcacacctgtgccccgtcccttccacagtcctgagcaatgagcagtcacagagctggggccgggggagggcatggagaaattgagctcctttgctcaccaacatttcagggagaccgcagtggtcttggtggatgtgaatggactgagttgcttctatcactcaaaatccccgaatgaacaggtggcgcatggacatcagaggattcaataacctgacaatttgcaaagatttcggtggaacagtgacaccagagggaggagggagcacatgattccaggcgctcagaaggaggaagctgcctcaagaggagggactcaggcagcccgaggtggccctgcagggaggacgcaggaggaatgaaggccctgtctccctcgtctctccttctgccctcctcccaagggcccccccgggagctgagggagcagaagcaagaaagccatctgggtcatccctccaggtcacctcccgaggcacagagcaaggcagaaaacttctgggccaggctctggcaggaccacttgcatttactctgtaagatgaagacaatggtcctgggagagcatagctgaccacctggcaccctgggccacatcgccttccagctctcctctcatctgaggtccatgccagctcctgcccctggctctggtgctgtcccacctcggggtcattccactttctgctatggggccctgtctgatttcatgagacacctctaggtctgcactaagacagcccagagttatgggcttatcaacgctggggataggcagtagcagatggtggataaaccaccctgccttccatctttcaggtggagaattctggaagacatcctgtccatgtcttggtgggtcctggtggacttgaacccctgctgtccatggcagcaacttaattcatctgccttccctgtctcactgtccttataccctcactctcatttcctgcagtcaccctcaaataagcaacctgcacccaaggcattttctggggctctcctttttgaggaactcaactaagtcaagtgaaagagccagtaaatggcaatgagacagttgatcaccgagataaaaaactataatgtcagattgctacctcttgccatacatacaaaccatttcttgatagattaaaaagttcagtgtaaaaacccaaagcctaaaatgtttaggagcatatatttatgagcttggagtagggaaggatgttttaaacaagacataaaaactgctaaccactaaaaaattgatcgtgattaagacctcataattaagagcttctgtttatcaaatgataccataaagaaactgaaaagcaagctatgaactagagaaggtatttgcaacactccaataagggatgattatttaatatatcctaataaaaatcaataaggagaaacatttttaaattgtaggtcacagaagaggataaatatattaaaaaactcaaaattagttatcagaaaaatgcaaattaagacccaaagtaaccatcaagaaaggcaataaaatgtggcagttgagagcaaagtcattatgtctggtggagttgagccctggcttaatcccatgggtgccagctatgtgatcttgctggcatcgcttccccactctgtggacaatagctttccatgcattaaacaggaataacagtagttcctgcctccttaggttgctgtgttacatggaagaagacatgcaaagctcttagcatgggtacttcacaaacagtaaacatgcaaactatatttaaaaaccatctccaggtgactcagagattacataatgggtgcttaataggagcacaacagtacaggtttttattttgtgtgatccaaagtactgcacttaaataacatgtgggtgacctccacaggaaggaatgggttctgccagcggtgggtctatgtaccgtactgcagcctcaaacacagacgaatgcgttagctgcatgtgagccctcatgataaaagagatctgaaaataaattgtgtatttaattcagagcgactccagagctgctgttctgggattgcagcagaaatcctggagaaagcctaagatttgggattttagatctttatgcatcacttacatccacacagaaagggcgttccagggactgcgcacccatagagcagtgcaagctggtccaccctgcggaagccaagacctccctgagcaggcagccacgctgaaggggaacagcagctccccgatggcctccaaaggactcaacacggaaagtgaagatatatctatggcctgagacaattctggcaacgatattcatatagacattacgttcctgaacagcaagggaatcctgtgaaaggagggaacagtgaactagagacccagattccagccctctctactctgaggagtctctatgacacctttaaatcagggagaatcatttctagacttcctggggttggatcgaggatccccagaagcaaccaacttgtattcagcatacaccagatgccagacacggtgtgaaattatttgtatacattttctggttcaatccaaagaactgctctatgaacaaagctaccaggacctgcagaggattaggtttaggaagtggtgaagctggtatttgatcaagcctaggtgaagtcgtgtttgagaaacagctctgtgagctgagtacaaccagaggattgtttccaaagttaggcccaagtgggcttccaagagcaggcatcaccactaaaacaaaacagtgacactcaaggcattggaggcagaccccaagcaaacctgcacgtgttggaaaaggcccgaggccaggaggaggaggtgttctctgcagctgctcagcctgttcattctgcaccaggagcagcgcaagctgctaggataccctaatggggcaagcagggcacttactccaggctctgcagcaggaatgcccaccatggggaatgcccactatgcatagccatctggggtctcatccttcaagccacaagcctgctccacctgggccctcaaccccactcttaaggtcggagcaagtattcacgcttaccccccttggaaatgagggagaaaatcgcccatggtgtgtaggggtttgtgtgtctgtgcatgcgtgtgtctgtgcatgcatgtatgtgtgtgcatgggtgtgtttctgcatgtgtgtgtgtgtgtgtgtgtggctttagttgataatggcagtccaggtctgcaagtctctaaggtgcaggcccacatctctctagagaggacagtcagaaccacattaatcgttgcgtcgcaggtactccatgcctcgcgctgttctcagcacctcacataaactaattcacgtacttctcccaataaccctatgaagcaggtgttatttttatcctgctgtggcttatggaaaaatgaaggtgcagagagattttgtatttatccaagattacacaactaacaagtggcagcgtgagatctaagcacgaagagccaggctccagagtgctttacctgagatggagacactctgaacttctgccacctactctcatatgcctgggtgatggaggatacacaggaggctgattttaattgtacttcctgtgaatgcacaattcaccaaaattgtaagaattccatccaatgtgaaaagcacacatttgcaactcactggggtgtgaaatgtcatgaaaataaaatagtgatgctgccctcgggaggttcaggacagaggcgcagtcagggttgcatgagggctccaggaaccctcctgaggactgaaggcacccctggctcccatgccccagacctcgaaagcccagtgttctggctcctgacaaggcaccggggctctggggacaggttctctacttaggaacaggctgaaggctggctccactcatgccactgccaggtacacactctgcttggtgccaggaagatctcataacaggaagccctcctggaggggaaggaggagacgctacagtccaaagacagtgtggagagaacagggggcatggcagagaggggcgaggagaggcgcagaagggctggagcctcggccctgagaagagcttgggaactgcccttgttcctgcgtgcgttcagttggccaactcgctactgaataccactgtgttctgaggcctggggagaaagtggatttaaaaaggcaagcttcctgcttgcatgaagctaacattctagaaaagaagacaggccataggtagaccgtcccgctggcctgtccaccgtcctcatctactcctctctctgaaggtcaaatagggccactctgagtgcagcacaaggggaggggaagagacaggcacccccagatcaccaaagacgagttaaaatgagagaaatgggcacactggaagtccagtccccaccgtatgcaatattcccatggagcaagcaagcatctaaaatataacagtattttttaaatagagaaagaggcaagaatagcaccaggaacacattctgcagagaagtgagccctggtatgtgctatgttgttcaaagaaacattgcagccttacctgacattcttaggtattccctggcttctaggaaaacctgttactggtgagcagacatcagggcacagattgggcctggtgtcacagtcactgtggccagggcttctggctacagtggttaagtgagcccaggaatctgttctggccccatctaaatgatgttattttaatgctagatttccttgaggtaataaaacaaaaacagggaaactgagggaaaggataatagacataaatcactaacctaggagtccaaacccccatttaaaagtaactcagaaggttaaaataaaaaggcagatgtaggggcggtgttgaaatccacaaaatcaaaaactttgctgtgccaaagacagactcaaatccactgattgccagggtctctggagccccagctaaaatgaatgaggaaaggccactacttccaccagggagggcaaatatgcgccccttctagggccagttctcccagagagctgctgggaaccttggactcatcttccctgtgagaaaagaggctgcagtcagctcagtgcccaccaggaggaccgcagagaggacagtgaccaccgctacgggtgtcattctagacctagtcgatgttttggaatctcagagaaaatgaaaatgcccatagacatctacacaggaaaagaaataagaagaaaatgagattttcttattttttaaaaataagaagtttaaaagaaatagaaatctttctgacctcagactcctctgcagtgtcaagtgtcaggaagcagtggagtcctgtccccggaaaactgggaggaagaagtgtagcaagctgcctgtcatgtctgagaggaacagaaagggcagttggagaagtggagaaagttaggtgagaccagcctgtggaaatcatgagaaatgacagagattaaatcagaaactcacacatttggaaagaagaacattaacatgatttagtaagttggagagttgaccctttgaagaacccaataaaatacaaaactttaacaaatctaattaagaaaaaatagaaataaagaaaattggaactaaggaaagagacgtaacatatgctgataaaagtaattataattatgagataatataatgcacagttatatgctaataaattccatcaacatgtaaaaatggaacacttagtgaaaataataaattaggaaaaatagctcaagaggaagtagcaccctagaacggagccatagccatggaagagatgggaaagtgttgttagcacactgccttggaaaatatttggaggtgatgagactttattagtgcatgttgtctggacttcatggaatatataaaatgcatactataaaatttatagcagaatatagaagaaaatgaaaggcaaatccatttactttatgaagaaattctattaaccaaatttggcaaaagtagcatgaaaaatagactcgccagcacttcccaaaatacagtggcagggaggcttttcttaacaataatggcaaaggaagaaatcattaggaacaagatggatacatgtaattaagtttaaatggaaaacctcgtatcagaaaacactgtagtaaaattccaagggaaatggcaaaccgaaaaccatttgtaagaaatacaagaaaggattagttattaacaaattaaaaaaatcctctcacaattacaaaaacactatataaccacaatagacaagtacattgagacaattatacaagcaacataaatgagcaataagcatggaaaacaaaggctcaagctcactagaaaggcaaagaattacaagttaaaatcagggtgtcatgttttagcctattaaattggcaatgatataagggttctctgccatgggcaacaccgtgcactgataatggaaatataaattgatgagacatttttggaaaaggatgtgacaacattttgcaagagttttaaatgggttcagacgccctttgacctggtaattccactgctgggaatctattctaaagaaatggtcaaagataaacagaaaatgcatgttcttccctagcacagctgtgagttcccctaactcagaggccttcctatcctcccatggactcctcctctatccgatctctaaacacttgggacccaggacgtagtacctgggactacttttggccacactcttcctgagggatctattactgtcccatagtttgaaaaagtcatctgcaccttgatgacttctagatatccatatccagtcccaacttctctgagttctagacttgtctatccagcagtctagtagacccaaattctctgagttttagacttgtctatccagcagtctagtagacccaacttctctgagttttagacttgtctatccagcagtctagtagacatcactacttgaatatttaataagcaccccaacgcaacaggttccaaattaaactgctggtcccctcccaagccttcctctcctttcttatctatttcagtaaatggcaccactgtttacacaattgcttagaccaaagacctacaggttataactgagttatctcttgctctgccactttacctccaacccaccagtgaatccacatcatgctcccttcaacatcaattctgaatgcagccacccctcaccaactcttctgtgactgttcacatccgtgacatgcacctgaaacagtgctctaagctcctacctggcctccctgcttccaatccagccggccctccccagtcatgagattctccatctgcagtcagagtaagctgcttaaaaacctgtgactctcaagcttccttcacacttagaataaactctgaattatttactttggccctcaagaccttgattgtgtggtcactgctcactttcctagactcttgctgtctctgctctctctggctctctctaaaccaaccacactgccccaccactgtcctccagtggccaagttcattcttgcctcaggcatctgcacttgcctgcaacaatccacacctagatttaaccagatttcgcctgctctggaaggacgttcctggcccctgggtgaaaatgacttcttccttttgctcctatttccatcaccctctagtccctaaatccatctcacttttcctcataacgctgatcacagcctgaaatgatgtttgctgcatttcctttccgttttctgtctggaatcccctggggatgggatctcatcaaaccccatcatcctcactgctgtctccagcacctgacacggaagagacagcaaatactcgctgaatgagattaacagtggtgaaaactgaaaactgcctgcatgttcaaaaatagtgccatattttttagaaatatagtggaatctccataaacccattaaaatcgtgttttcaaaaaaaagttttaaaaggaaaattttcattgttaaacaaggtaatgtgataaaaagtaagatgcagaatcatatattttggtgatcccaattttgtaaaattatttatctagctaggtatttaaatataaagaaatacactaaaacattaataatgtttggatttgtataatagaataacaggagactttttattttattatttatacttttgaattttgcaaattttattaaaagaaactgacattgatggacattttttctatttttttttattcatttatttttgacaatcattgtgtgtatttagtgggtataatgtgatgttttgatctatgtatacattgtagaaaaattcaatcaagctaattaacatatccatcaccaagttatcatatttttgtgttgaaagtgtaaaaagatctatttttagtaattttgaagtatataatacattcttattaactgtggtctccacacatcaaaatacatcagtaaaacttcctcttgcagtaaactttgcactgtctcatcagtgtctcccatcaccccgcccctcacctgccccacctctggtcaccactgttttgccctctatttctatgcagtcaactttctcagattccacatatgagtgaagccatgcaggatttgcctcctgtgcctggcttatttcatagcataatgtcccccctttccagccacttttatagaaaaaaaacttcatactctgaagtgagagagaaaaatgactcctgcctggctaacagccaggagggaggaaggtgaaggaggcgggtgagccagttctagggctggtccagaaggtggccactcttgaccaagagatagacgggagtgaggcagcgggcctcactggaggagcccgcgccattctcaggagccatcacggggacaggagatgcacacacttctctggtccttgacaaatgaacaagtgaacgcctcaatggtaagtccacgtagcccataagagaggatactccaggatgccagtgtggcagaaacagcaaacacagcctctgcgctccgcccccgtgcaggtttttttgaccacaggctcctcacagccagcctgtgagcaaatgctgcctcatgtactgtgcacagagaggccacagatgactgtggcctctgctgattactttggaattaaaaacaccatgagcccaggcctggaaacacagaggccttttgtgccagttaagcaccttcagggggaaggagaggaagaggaggaggaagaagatggggaggaagggaggaagggaaggaggaggtgaaggaaggaaaggagagggaggagaaggaggaaggcaggtgaggaggagggaaggaggggcaagaagaagggaaagggggagagagaggggtagagaaagggacgacggaggagatgggaggaggatggatttggagatggggacaagacccctgcatcctggccctctggacactgtatcctaaaagctggagctgtttattatctgagtgatattatttggggggcattaaggaaaaatgagcagaagaaattgtgctcttgagagatgaggacagacagaaacttcagacccattcactaaaggctgaggatacatgggagggccaggccctggatgtgtctcaagaatcggggctgtgctctgagatgaccagctggacagccagaggccctggcttcccctgtgtcatctactgttggaccagcttattctagagcaatgtggaaaggaaggatgatggaggcagaaaaaaagaagaaagaggagagaaaggaaaaatggacagagaaggggaggtagagaaagagagaggcagaaagactgaaagatttcaaaggcaaactacagctgtgcatggtggtgcatacctgtagtcacagctattcggggggtggggggtggtgaggcaggaagaccacttgaaccccggaggtggaggctgtggtgggttgtgatcgcaccactgcattccagcccaggcaacagagtgagaccctgtctccaacaacaaccaccaacaacaaattgtttaaagtaaacctcctcagtatggcttaaaaggaagtaaagagaatggatcaagccatgcagggtcctcacctggttatcagagagaaatggacagcaagaggggcttctccgaagtgtagctcccaactctgcacactcaggcctttcacaagcatggatccatgtgaccccaacagtcctacagggtgtatggaacattccagcccctttgtcaggtgagaactgaggctttggagaggacagaggagtcaaagagcttcagcgggtagagccagcctctggtcctgcacaagcccacaggtgtgtggaaggagatggaggtaaagcacctgccgggacaggaagggcctctatggattagggatgtttccaaagctggtcagagagctaggaccagagtgggagggctgcagctgaaaggtagtgtataataggctttgggtatttgtgttcgtggttgggcgggtaatgttttccatttccagatgcactgcagcctctgcccacacatcaacacagaaaccccgccatttggaaggtgttctgtgcagacacctaaacgtcattatcccaaaacaccaagccagccagccaaggcttcagaaagtacctgaacagctgagcttgctgttttgatgaaacgctgtttgacagaaaaacaggccacccctggtaatatgtagagaatgataggattcatgaatatgcatgaagtcctctttctagagacaattgccgcagcggttattggagcagaacaggccgggtgggaagacagcttattcccaaagccactctgcctccctgctgggagtatatggaacttaagatcatttcctggggccccatggtgtggtctcagcactacctaggcccacagaggccctctgagggccacctgatgagggccacctcaccctagcccaccacacattggtcagagcagaaaatagagctgaaagggaagaatgggtttgcccaaggtcacacagcagctcctgacggtcaggacctctgccaccaggtcaagtggcccccacattgcaggcccctgggaggacacagatgcagaccagaatctgagcagaggacagctctcaggacagctcagctggcatgcccaccctgcaggggaaagactgcccatgcccacactgaggcaggggaaccacggtgaggagctgagtgaagaccccccacagagctaggcccaggactcccagggggagagtgtggatgggtatctgcctccaccccgagctgtctgcaatttctttccatgcaaaggataaggtctgaccaacacagtcacaacaaggcatgagtgattctcaggttaactctacttttgaagaagaagaagagcccacaaagaacttaaaacagaactaccattcagcccacctatcccatgactgggtatctacccaaaggaaaatcaattgttccaccaaagggacatctgcacccgtatgttgatcacaacactattcacaatagcaaaggcatggaatcaacccaggtgtctgtcaacagtggactggagaaagaaaatgtggcacatatacactgtggaatactatgcagctgtaaaaaatgaccaaatcaggttccttgcagcaacatggatgtagctggagaccattatcctaagcgaattaatgcagaaacagaaaacctgttttcacttataagtggaagccaaaccttggttccacatgcacataaagatggcaacaatagccgggggaaccactagaagcgggagggtgggagaggtgtgtgggttgaaaaacagcccattgagtaccatgttcactgcctgggtgatggggtcatttgagcccaaacctcattgtcactcaatatacccaggtcacaaacctgcacacgcagctgccaagtataaaataaaagtggaaattctaaaaagaaaaaggagaagaggaagaggaaactagaaaggcaaagggaagagacagcaatagtggatgatgctcaagtattccatagattaccccagccacacccctagtccactggcagcaacatggtccaaagcccgaggtggccgtggcaagagccacacccctggtctgagtccccatgcagcctccacacttcagtagcaggagcaaagctggaagtcagacattttccaaagaaagccaggcatgcttggacagtgggatctggccactgtcagcatccagcgcctggtgctctgaagtctgaggagagtacagggcaggacaaacccgctgtcgggtgcatctcacactgaagaggcaggggacagcagttccctttgatggagctacgcagatctgaggttgctggaagcagcaacccccgtttcatctgcttttgaaggagtctgaggtagacggctggcgggaaggccacgccatactgagcacaagggccactcacttgcagaacctgctgtgaagagggaatccaaacccactttgctggtgcaaatggtgctctgcaggcccagggcgaggagaggccatctggagttcacaggcatttaggaagcagagtggatacatgaggagcacttctggaaacctgttttgtaccacggcaccccagagacctaggagtgatctcaagctctgccactttggacaacgtttttgttagctctctgggcctcattctccttctctgcagctggttgcatgccgtgtgttctgccagctcgctgcctcattcacactggccagtgctctctgcccaagagcttctctgcttcatgtgccaatccagagatgccagggatcgcgcaccttccgtgacagccctggaccgatggggatggagccagtggatagatatgcccccaggttcactttccttccttctgtcttcctgtcttcccagttctctatcccaaattctctaaagtcacttccaaaaatcaaccttctgcccacaggcccttgtcccaagttcttgggttctgagaggaatccaggctaagactgaaagaactacagacccacaggagttccagccatggcattcacgaccctcctctgctgagggcaggctggggttttacttccccttcttgtctgtgggtgggcataggtggggagaggtgcaagctcaggagctgggctattccatggcctcgccccacctgggagttatatcatggattcctgggtgggtcttccaggaagagaaacggatccggaactgtggacgcagggtcgactctctgaaatcccttctcggggctttggaatttgtggtcccttaatgcttcagtctcagcagcgcctcgacagtcatgcctctggccttcccaagacctctccccagcatgatgaagggtctatgctctcccagcatctcctccaacagaaatggtctctgcctctgagatgtggcaatacagagaccgtgcatcatggggaaaatgaacagaagggagtaaccatagggagccagctggttcagggatggggcagagaaaatagaggaagagcctggagtatcctgtggccactagacagtaagaaagtattaaatagccaggagatcggacagcctgggcaacatagccagactctgtctgtacaaaaaataaaataaaaaatagccagctatttgggaagctggggcaggaggataactggagcccaagagtttgagactgcggtgagctatgattgtgccactgcactacagcctgagcagcaaagtgagactgtctctaaaaacaacaacagcaacaacaaaaacatatatgtatgtgtatgtgtatttcaaaaggctacaggaagcaaaccgaaggggctccgaatggccaaagttaggacaacttgagcaaaataaataactatggtattgaattatagcccaagacataatgtaaatatccataggtccatcctgattaaatgcgtaactgaatacataaataaatgagggagaagcagcaattcttccttacagaagaattccgaataataaatgtagaagaaataagggaagtagaaattcatcaatagcacaccacagtaataattgttacagccaagatctactgatggatatgaaaatgagtgggggaaagtttaagcaaaaacaggatatttacataatctcaaatatctgctttccaatacttagtaatttcaagataaaaatagtaagtttgcagtagaccattttggtagataccaccttagccaagtgatcaaggactcaccaatagtaagacacattgaagtgacatcatgtgtccccaggatgaggcactaagaagggcaagtcgctgctgtgggatccttcccaataaagcataatgtcaatcaaatcaggagtaaaccagcagacacacccaaataaaggggcgttctacaaaataacttaccagttctttcttccttctcctcctcctcctccttcttcctctccttcttcttctccttcttcctcctctcttcttcctcttcctcctcttcttcctcctcctcctccgtcttcttcttcttcttcttttccttctccttctcctcctcctccttcttcttcttcctcttttttttaaagacaagatctagatctgttgcgcaggctggagtgcagtagcctgatgtgcagggacgcgatcatggctcactgcagcctcaatgacctcccagactcaagcaaccctgccacctcagtctgccaactacctgggaccacaggcgtgcaacaccacacccagctgtttttatttttttagagatggggtcttgctttgttgtccaggctggtctcaaactcctggctccaagtgatcctcctcccttacaaagtgctgggattacagatgtgagccaacatgcccagccatcttaacagtcttcttcaaaaaaaatatttttaatacaaggtcttgctttgtcatccaggctggagtgcagtggtgcaatcatagctcactatagcctcgaactcttgggctcaagcaatcttcccacctcaacctccttggtagctgggactataggcacatgccaccatgcctgactaacttttatttatttttattttttgtagaggtggagtcttgctatcttgtccaggctgttctttaaaattttgaagattaagaaagacaagagaagaacaagaaactgtcacagattgtggggcggagagactgagggggcaggtggctaaataacatgtgggaggctgggtcagatgctgaaacagaaaaatatttttatttttatgtaagaagtaggtgatagaagaaagaaaaggagagagaggagggaaggaaggaaggggaaagagggagagagggaaggaaaagagagaaagaaagaaggaaagaaagagagataaagagagaaggaaagaaggaaggaaagaaggaaggaaggaaggaaggggagggaggaagggagggaaggaaaagacagagggaaagaaagaaaagaggaaaaaagaaagaaagagagaaagagagaaggaagggagggagggagggaaggagagaggaagggagggagtgggggagggagggagggaaggagggaaggagggaggaaggcagggagcgggggagggaaggaagggcaaacaaaacaagattgttagaggaaaacccggtgaaatccgaatgagttctgtgctgtggttactagcactgtcccaaggctaatgtcttagtttcgataaacggtctgtggttatgtaaaatgttaacatattggggaactaggtgaagggtatgaaggaattctctgcactctttttgcacctctttggtaactttatcacaatattcaaaacaaaccctaactgtaaaaatatttaaaggagcaagagggaaaaatcacataaacatggacacttgtgcctgccattcccttggcaagtgtgagatcaggagtgaatctgtgtgcaggcctcagcgtgtaggcacctcagagctgtggccccgaaactcaagctggttatttcctctgtcgtcccagagaaggagcatcccacagttcagtcacgagatgagaatccagtggtctggagggatccagtgctcctggtctcccaggtgatcccctcgtcctgcactttggaccagggcctcgtgttctgagtggagaccgccagccgtgtgtcaggcagggttccacggtggcccccggggttcccttttcactgtccttaattcctgcataagcctgggcttggaggtggactgtggaatcaccctcaagctttgcccctctcctctggttccacgcttccccggggcccgaccgcttccctccaggcactcaccctgaccgacgcactcagcactgccacgcctgctgatgtccagtgacgaagcactccgagtgtttcagcctggaccgtgcggggactatgagggccatgtgctgtccttgctactccgatgagatcaggtagtgtagggttgtgacagacgtatttatattggtgtttgacaatggttcctggctgacaacctccgtagcccttgcaacagtcttttgtggtcatgttgggtgtgtcaggcctcaggaacaggcctcaggaaacagtgtttctccaagctcttcctgccctcccttcgcctgcctcaaagcaggactcgaatcttctcctgcctctctgatttggggtcataagaccctccccagagagggtcccaccctactccctgggggaaggaatgcacacgtcttggggcttctcctaaaaacccgagaggactgggttcgggagctttagggcggctgaacataggcaggctcctggagggtggcctccagggagggcacgaaagctccatgcccctccctcaggtctatctcccctgtgcatctcttatcctttgtaacatcctatataacaaacgggcacacgtgtttccctgagttctgtgagcttcggttggtcagaggttctggaggcctggacttgtgactgatgtctgggggtggggcagtcttggggacagagcaatcaccctgtggaatatgacactctctccaggtagacggtgtcagaatggattttggacaccctgctggtgcctgctgcataattcatcactcgcttgctggtggggaaaacgccccacaagtttgctcacttctgtgttgatgattgctgctgcagtggtttgagggcagaggaaaaacatagtttgagagtttttcaaaaacaggcattttcactatatttaggacagaggctgctgagagcaggtgggattgtcttggagccctgctcctctgtgccctcaagatccaaagtcaaaaggctactcaggccaggggcagtggctcacgtctgtaatcccagcactttgggaggccgaggcggaaggatcatctgaggtcaggagtttgagactagcctggccaacatggtgaaaccccatctctactaagaaaaaaaaaaaaaattagccaggcctggtggcacatgcctgtaatcccagctactcaggaggctgaggcatgagaatggcttgaacccaggaggcagaggtggcagtaagcccagatcacgccattgcacttcagcctgggtaacaaggcgagacttcatatcaaaaaaaaaaaggctactcagccagctcctatgaccactgaccctctgtactatggccagactccacagatgaaccaggcatcttgggtggtgttttaggatatgacctacaggaggagccagggccagggagactgaaagccagtggggccagacagtgtcaatagcaccagagcactctaacacctggcaagcttcaccctgagccagggcccccaccagccagcgggagaatctgtcatcgtgacaagccaacctgccttccgcctgtgctgcttcactggcctgatggttagggaaggaaatttgatctctccttcctgcccagttcctcttaactgcaggcccagggcggggtgacagcagcagttggcatcttccaggcaggaccctgtgcacactgactgcgaggccagagggaagggccaagcttgggagcctgccgagggaggcagttaataggtgagcatctctcagcctggagagccacgatcctcctggaaccctgcagccaacggcagctccccagcatcaggaagtaggaagaactctcccggctgtggaatctgtacctggcatttaaagtttcctctcccaagtaatctttgagacacttgcttattgttaaaggaaaaacctggaccgtgtaggagaacatccccccacactgggaaggagctgagaccaaagaatgactgggacacacccagtatatgagtttattaggactccatgcatggcccccctgggtggtggcaggacagctctggagatccgccctgcctcccatctctaagctgcttttgagctagttttctggctctgtgtgcaaagagactgtttctcttggtctgttcccagatacactctgggatgtttgggttctcagggacacctgcttctcagctgggctctatggccttgattcataacccggtcttcagggttcaagcagcagacatgcaaccttagataacctggtgggggacctgtcaccctacacgtatgatcccacacttggactgaaagggagggtaaatagaatacttcctaggcaagcttgggtgtggagatttaactctaaggaaatttgcaataggaaaaatcactgaaaaggcactggtgaaataatggataaagcacacttgttgcttatagcatccagtccctctttgttcaggaaataggactcggggagtggagaatgtggttctggaattcgaagagagttctgggcactgtgctctccctgtcacttaacctaccttcaactacagaggtccccagttgcccattccttcatgaatcacagttcccaggccacagggattggctcatggtcgagcctgtgacccaggcttatctgacaggaggacacctgggactttcttcctgggaatggtgggacgtagctcgtcttcccatgagccaggctgccatgggctattgagattgctaaaataactattgcagctataaggtgaactggtctgaaggcacagttaacacccaaaggagagagtctctgagaaatagagctggaatcctgaggacattttgaatctctggattgaactgtacctgaagccagtccatatttagaatttttgtttccatccatttgagttttttaggccagtttagattgggttccctgtcacttgcaactgaaataactgaacatctagaggttggctataaagcactttccccagcaatcatttctgggtggccaaaatcatgatgttgttttacaacttcctttccctggcctgaattcttgaatttctctctaataagcttggattatattttagagaagataataatgttatttttaccttgatatgatattacttgtcttctgtactcaggtgcccttcaaacccaggggaaggctccacctggatgtcctaggagctctgatccacatggaacttgcctgccagggctccttgctctggaactttacagccttaccaactaacacttgtgtattaattacacctttttattttttgtcttggaacttggcagatcctagagagcctactcctcctagggctagccaatggctggagatagtaaatgagcatccctttcatatgaaaaccaccaaatgcagaacccacatcccccaggccccctttatcaggcttgcaagggcccatatactttgggccactattccctttccctgatcatcccagggccaggcgcctgtagcccaggggcctctgaaagtactagaacgagccaatcctgagccccaagtctgcttaccccgccctgccttgccttttccatgggaaccacagtaaaggctctggtctctgtttctcccttgctctccctgcctcctgaccgactttggtgcctccccaggaggccctgcatggcatgcctcccactttgggaactgcgagtgaaaccgcctttacaaaatctgacagtaagaggctccatcttgcttctaccctccaaactatccttggtcattcctgggcataggccaagttaattttgggaggaattatactttctagtttaaagcaagaatgataatagctcttccccaaactaaaccacctttctaaaactaatgaaaatccacaagattaggatgatgagagggacctgaattctgctaagatataggcattgctaaatgataaccagccattgctccagaagtcacaagatttgtaacttccccaattactcctgcaggtaacatcactattgtagaacctgtgcctggcctttggagatgtcttttcagactgtaaaaagtgaagtagaggttcctcttcaaagagactctcctccccatctgatgaagaacaagtagtaacttctcttagaagcgaaatttatacaagacctgtgctaacattcttaaatatctgccagccataataaagaaatcaatatactttgtgctcttagctcccacaatttagcctaaatatttgccctggcatgcttatactgctccaagcaagcattatgtcatggcctgttcctcttccttatttggaggtatttttacctttctcagcattccacaagttacttcctccttcctttgttctcctctgcctttgcctcttttgaaaagttctaagttgctagccaattgggacaaatacaaaatgtgaggtcccattccaagcaatggaaaccagacacagcagtaaggtggacatgttaggttataaatgaccctgtctcctttgtttggtgtattctcatggcaaaactgctggggagtgtaccctttctgcagaaagtaaaactggccttgctgagataatgaaatttgtgttcaagtgctatttctttgtggcaccggagaacaatcatttgatttttacatataacaaggcttttgcatttctgagatcagatgactccacccggacctggacctgtggctcacgactcagcagatcctgtggccccacccagaggcaaatgcagcacatgcggaccattttccatactcctatgatttcattcttaaccaatcaacagtccccattcctggcccctgcccaccgaactgtccttgaaaaaccttaacccccaagagccttggggagaatgatttgaatgataactccatcttctgcttggctggccttgtatcaggtaaactttttctttactgcgatgttgtggtctcagtgagttgattgatctgtgcagcaggcaggaagaactggtcagggaattacaggagtaacgaattaccattttaatggcaatcctcttctgatccattgacttcaccttatttaaataataataataaaactcacattttaaaacaacgttcatctattaggtgccacacaccccacagggtgctcagacagaccctgtaaagccaccagattttcctttcagaagcccttctcttgcaccaggaagagagctgttcccctttctctttcttttgcctgttaagcctctgctcctaaactcactcctcatgtgtgtctgtgtccttaatctccttggcgtgagacgatgaaccctgggtatttaccccagacaacgacaccacttaaatgtatttttgtaactggtacaacgttgagcaaacagtaggcacttaaccaaggcacactggttatttgataaagcagactaatcaggccacacaaaagccacagtcactatataatatattgctggaggggcctctgatagcttctagatcaggatttatacagtgcctcttccattagatgttatgagggtctatcttaggctgggttcccctagaagcaaacctgaaacaagggtttgcatgccacgtggctgatttgggaggcaattccagaaagcacagaaaggaagtgggaaagtgaaatagagaagagaagacagcccacaccaggaatgttggtgaacaactggggcttagtcccctggggacctctgaagggcagtgtagggcagtgatcctcatacattggcacatgaaggaatcccctgaggggttgttagagtctgtgccccaccccagagtccccgattcagtggtcccaggtgacatggctactgctgggcccaagaccacacttggagaaccacaggctcacactgtacatgacagttgcctctacccatccccaaggaagaagaagtttttttaacttttatttaaggttgagggttacatgtgcccctcaggtacatgtttgtcatataggtttgttacatatgtaaacttgtgtcatggggggttgttgtatgatgtatttcatcacccaggtattaccctagtaccccgatcctctccctcttcccaccctccatccttcattaggccccagtgtgtgtcattctgctctatgtgcccatgtgttctcatcatttagctatcacttataaattagaacatgtggtatttggatttctgttcctggattagtttgaagcttgggtatctaccatccaagtaactttcattgctggtggagggcagccctcaggggcagtggctctctagcactggtggcctgtatctgtatggggggagagaaagtccttgtgcagagaagctggcacttgcagtaaggcaccatgagctcgcctggggagagtcagcatggagccatgtgggaaccccagcagtgtctgttacagcaccctgcctgtgatggttaatcttatgtcaacttgactcggctacaggattcccagttagctaggaaaacattatttctggctgtgtctataagggtgttcccagaaaaggtcagcatttaaatcaagcaactgagtaaagactgtcttcacccacgtaagcaagtattacccaacccattcagcaccagaaggggattaaaaaaaaatgaagaggggggatttgctttctcttcttaagatgggatatccacctgctcctgctcttggacactggagctcctgagtctcgggcctttgattagaacttgtattagtttgttctcacactgctgtaaagaactacctgagactgggtaatttataaagaaaagaggtttaactgactcacagttccatggatatacaggaaacacggcttggaggccacaggaaacttatatcatggtggaaggcaaaggggaagcaagctcatcttaccatggcagagcaagagagagtgcaaaggatgctacacaccttcagacaaccagatcccatgagaactcactccccatcacaagaacagcaaggcaaggggggaatatgctcccatgatccaatcacctctcaccaggtccctcctccaacatggagaattacaattcaacatgagatctgggtgggacacagagccaaaccatatcagaactacaccctagttttcctgggcctccagcttgtaggtggcagactgtgagggctccctaggctccacagtcatgtgaaccagtcccccatgttaaatatctctctcacggccaggcatggtggttcatgctcgtaatccactttgggaggccgaggcaggcagatcacttgaggttaggagttcgagaccagctcggccaacatggtgaaaccccgcctatactaaaaatacacacacacaaaaaaaattagctgagcatggtggtgcacgcctgtagttccagctacttgggaggctgaggcaggagaatcacttgaacccaggaggcggagcttgcagtgagtcgagattgtaccactgcactctagcctggtgatagagtgagactccatctcaaaacaaaacaaaacaaaacaaaaacttcctctctctctctctctcactaggtatatagatagatagatagatagatagatagatagatagatagatggatggatatggatagataatagatagagagatagatacatgctgttcattctgtttttctacagaactctaatactctaccctaaaacaaaacttctgtagtccaagaagcccccattctaatcagaacacacaaaagccacagtcactaaataatataatatgtaatatccctttctggaaagtcacagtattcactcacatagtaagtgttctcagaagttctgaaatgaggagataccttgaactcaatatttcccacatttatttgaccctcttttgggagaaggcagtttggaaattgttgttctagattggggtttggcagatgagtcctgtaggctgaatgtgacctgcagcctctctgtgtgtgtaaactgtggttggaatgcagccatgcccatttgttcctatgctacctatagctgctttcagctgcaacaacagagctgaacacttgtaatagagaatgtgtggccacaaagcccagaacatttacaatctggcccttggcagaatagttctagactaacagacagtgagactgtgacccaaagagggaaggcattttccccaaggtcactgaggagatagtggtaaagttgggacaagagtgcctggttcctgatcctccccttttcctgaagacccttccaccactctcagctctgcctcacagttcctctcctttatctcttggtctctatccttggctcaccaaggtgagtgatgatcattctccagaaagcaatccccgtgcttctgtctaaaggctcccctggaggccactggaccactcacccatcaggtttgtgtgaggagccaggcctgttttaggaaaggggatgattcaggaagcaagacctggatggcatgcttctgttctgggtgcaggctagtggagaatgggagaccaagactctctgtaaaacaaaaaagaatatcgtttgtgctgaatgttttggagacaactgtagcaggacgagccacagacaacacccctcagacactgggttaaagaaggaagtggctttattcagccaggagcattggtagacttgctctcaagaaccgagctccattaagaaagagttcctggcccttttaagggcttacaactctaaggcgtccacgtgacagggtcgtgatagattgagcaagcaggtggtacatgactaggtgggggtggttagcaaggcaagtatttctccacaccattgtctgtgatctatagatagcacaagctctagggtgggggttaatgtttaacctacagtcctggccagtggcaccgatcagtctgttatttttcagtttttacttcctccttttctttggagacaggagacagtaagagaaatggcctctctcctcacaatgacacaagtaagccagaggccggggagtctgttgaggatggctgggaattgatggccatgggagccctttgcaaggagggacacgaagctaagatgcaaatcacagagctaagacactgtgtgaaagccgaaggacaagcatccaggcaggaggaagagcaagttaaatgggtggagagggagcaccctagcaggagaggagggagggagcattgagtcagggagggttgtggcctgaccatcgaaagccttgcggggcatgttcagaaatttggactttctcctcaggaagatggggagctggtgagtgcaagagcaattcccaggaaacagactaaaattctaacacatgtgcaggcttctccatggacaccgatggtcccagaggcctagatcatgcaagaaaaggcacatgcctgcctggggatgctccaagggacgggttaaacattcacacatctacaccttagatgaggcagcatgtgccgtccttaggatgccctacatcccagcgtgcccgggtcagtccccactcgcatatgttgccctgatattgattactcataacaccccctttcactcttaatcgtttcttggtgtgaatgataaattatatggctacctaattataccatttgcgtccacctaatttaagcctcagctcatgaggcccattactattgggtcgatggtttattctaccttgaaatataaattccttgcaattaataaaaactgtcacatgtttatgtcttatttctcctgctgcactgtgtattcccaagggcaagacacgtgtgtttatcagttcattttgataaagagcatgtattagtccattttgtgttgtgttgctatgaaggaacacctgaaactgggtaacgtacaaagaaaagaggtttgtttggcccatggttctgcaggctgtataaacatggtgccagcatctgcttggcttctggggaggcctcaggaagcttttactcatagcagaaggcaaaggaggatcaggagtgccacgtggtgaggagggagcaagagagcgaggaggaggaggtgccaggctcctttcaacaaccagcgctcccatgaactcattaccactgggagcacaccccgccatccatgagggacctgcccccatgacccagacacctcccaccaagctccatcaccaacactgaggatcacatttcaacatgagatttggagggacaaacatctaaatcatatctgagctttcccacatctaacatgaaagtaatacgcaggcttaggcacattactgctcataaatgaggtcattttgtcttcacaacaaaattattggagtatggagagtcatttcccatttatgaactggagaggtaaagtgagtcgccaaggtctcacagccattagctgtcagaatcagaacttaaacctgggtgtgacaggctccatccctaggcatctttctaagccaccaccctgccactgaaggcctggctgacctctctcccagggcagctcctgactgcctaataagacagaggagaatgcacaataacctttcctgtctgagttttgcaaatataaagcgccctgtaactgctgaataacagccgtcagccttggcgggtgatcaggacatagtgaggactgttgacggtgttgagatttttatgactatttcctaatgggtgtcaggtcagatgtaattccctgtaatgtcagagcttatcagtctcgctcgaggcagtcagacatggcccacacagccagggtgttcttggcgcacgttcaaaccatctgagtctcttctcagagggttttctgaacactagcccccagggaggtacacacggaagatgcaggtatccctgggactagttggttgagggagccacagctggggccttcactagcagccttcacctgtagcctcagggagacttgtaaggtactttgtgctctctcgggggcagagccatggtgccaggggaaccccagggactggagagtcctcatgttctttccctccctcctgaggcaggctcagagctgtggctgccaagaccattctcaccctagctcagcctacagccaccggagagaactgggtttcaatactgccaagtgccacttctcagtccctctaggcctcaaactctacccctgtaagcctcggtgacaggggccacctcacagggctgctgtgtagttgaaatgcctgggggcttgcacacagtaggtgctcagactaggggagccatcagcatcctcatcatcacatcctcgccctcttcaggggctggagctctgaaagagcagaaggtgggcatggaggaggtgacctccccccataagctgccttctatgtctctgtcctgggacaccccaaggggcaggggaaccccgagctgagagggtgacacacagaaggctaagttgtctcctgcaaaatgcttccccgggcccagctcttcccctggttttctgcaccctgcaatgagtccacaattaggttaatgagtaaattggattcggaagcctggaaaaatgatatcctggaccaccctgctctaagcaagagctgtttatcaatgccagtggggtacacacatcctccattcaattctctgttcataagttttcattttattttttactttcaattacggaaattttcaaacactccccaaagtagagaaaataatataatgaatcctcatttttaacaattacgtgtttctgtcattcttctctcagctgccccatacacatacatttttaaggcaaattcccaacatcgtgtcatttcactcctaaatacatccttgtggtgccccagccatctttggtgcatggtcggggaggcggggagaggggtgggggaggtggggagaggggtgagggaggcggggagaggggtgggggaattccacttcaaagacatgggtgaccggtcctggaatggaaccagagtccagggcctccagaactgctctttacaaacatcccataatgcacctggagtgcagggagttaggagtagatgtgggaggaatctaccttggaatcttatcttggaatctaacgccagcatggaggacatcacccagccctggaaatatccgggtgtctggagatgcatccacgccaggacccatgagcaagggagagaatgcgaccaactcctgggactctagggcagcagtcttggggaagtgtggcatcctcactgtgagagagagagagctggaggcagccaccagctccccctccctgccctcctctgccaaaggaaggccctgctatttcaacacaagcggcttgcaggaggagcctgttaagaggacggctggtccactgaaaaagcggcagcagcttcagaaaggttaaaatgtgactcccctgcccctgacaaaaaaactgttttcaattcagaaaacaaggtgtctatggccatattaccatggacgtgcctggtgtcatctgatctcagaagctaaacaggctctggattgatcaatacttggatggaagaaaacaaagtgtgcccattttacagataagaaagacaagcctcagagaaataaaaaatttatcagccaccgggtgacagaggcggctctaatccagtgattccttccctccttcctcatcttgtcttcctggttcaaggttagctcccagagctcattcccgggaggaaacagttctgggtgactgattcactgatcagcttggtttgggtttcataaaacgctgtgctggaacactgagtcggtacttctcccaagtttccagttcggagacacgaggagaatgctaaaagctcgaatatgcaaatgaacatttggacagatttcctctagagtttcggcctccaggcaaatgatttattccctgcagaaatgcatttttgtttctgcttaacgggtgaaaaaggagaaaagatttttcgggacaaccaagcttaggaataaaagtctccatgggaaatgtacttttctgaaagcaaatgttggctaaacaaggacagtgttgactaaacacgtgttcccctcacccaaaggaatggagtcagagaatcccccaagctccaaattgtgggggcagatggatcttttagaagttcacggttcgcctttctcctgcccagccccatgccttaagcaaagtgtgggatggtctcgggaggacacccacaaatgtaagtaggaaggtgggaagcagcctctcctctaatatagaaaaacaactgtgacagacagaacaaagcatgtggttcagacacgagaccctgagctagccctggggagggagacagcagctttgcagccgttatcctcaggaagccctgagcgctgagaggcactgttacagaaccgaactggggtccactcgctaggtgagtaaaacccgacagccacaccgagttttcacagcaataaaaaggaaagtgtttatttgcagggcaccaagcaaggaggatctggaagctactgctcagctcctgacctcccacatggcttgagggtgaaggtgtttaaaggtaggggtaggctgggtgcagtggctcacatctgtaatcccagcaatttgggaggctgaggcaggcagatcactggaggttgggagttcaagccagcctggccaacatggtgaaaccttgtctctactaaaaatacaaaaattagccaggtgtggtggcacacgcctgtagtcccagctacttgggaggctgaagtgggagaattgcttgaatctgggaggcaaaggttgcagtgagccgaggtcacaccactgccctgcagcctgagagacagagcaagactgaaaataaataaataaataaataaataaataaataaataaatatatatatatatatatatatatataggggtaaacttcagaagagcagaagccacaggcaaaatcagaaatcaatatatggagggtacacactgattttggcctaaaagggtgggggcatctttaaaggggaggagcttacaggtcataggtagattcaaagattttctgatttgcaattagttaaggaagagaagctttgtttaaaaattgggggtcagcagaaaaacatgttaactggctaggggacagggtgactcccaccaagcctctcaggaataaacttaaaacaaagaacagtgtggtcagagttctgcctgcaattcccccttatccgaggtctacctgtcagcgaatcccaccggggtctgcagtggggtctgggtgtgtgaaagaactcagggacatatgttgagatgttatctttcatttctgtagagaaaccaaaaatctctggacttatttccttggctttaggtgacgattgctttcttgcttacttacttttcaggcctacctaggtgcctggaatttcccttcgaggaacgcaggagttttctttattttcatgcttgggaaggctcattaggcccctaagagagggtcccttccccatctcaggactaaaatgcaatgaagatgttgctcaggtatgctcggggaagacaggctgggagggctggggccacctttaaggagaattcctaacacactgggcgcccgaacccctgatgggaccttgtggtcttgaatgaaaagatcaggcattagctctgtgtgcccactgacttttactaaacaggctgctgcccagcctagttcaacgtgaccccatccccaccccctttctctgtgctcccccatcacccagcccacatggtgggaccttcactctcatgaccagctcaggccatgctgtgcactcctgatgaagcctcttgagctccttcttcagagctgctgataatctggcattgaatggccaggctggaggttgaatgctgaatccttttgaatgctgtggtaaagcctggcatgtctcagcactgtctccttttgtgttcaatcatcctgacactgcagaggcagctggagagggatgggtctgtggaggatgccccgcagagtgaagtcgagatgatgcagccaccagggccggagggtgagtttcctagtccttgtgtgtaactgggtcactatttttagttggaacctccagtcaaaaatgtcaaacagggaaaatgaatgtgggcttggctgagaagaagccagaggtgaaggttttgttccatctcacttagcagctcactctgggacttggaaaaggccttttctcagttctgggcccaggctttcccacttgaacagctgacattctgtggatcagagaccaccactaccgcagggaaaagggacttagccgtaggaagccagcagcctgctggaaagttcttgcagatgtctgtaatgctgaggtttgcactcagctctcccgctcttgcctgcgaaagtcagaaaatgtggccaggtgcagtggcttacatctgtaatcccagcattttgggaagccaagatgggagaatcacttgagcccagcagttcaagaccagcctgagcaacatagcaagaccccatctctagtgcctgtgggcctagctactcgggaggctgaggcaggaggatcgcttgagcccaggagttcagagattgcagtgagtcacgatgacactactgcactccagcctgggcaacagaatgaaattctgtctctaaaatataaaatgaataaaaaatttaaaaattcaagaagcagaaaagggaaatgtttagcagggtcacaggtgccacagatttcagcatgctgcggaggagccccacctgccaccgccccatcagccaggcccgccggcccatccccgcagcctcaggacccccaaatctagagatccccaggccatggaagatgcatgggactcaggactggaagagagatcagcaaggcaacttcctcatctcctggctaactgatggagctattgatggaaaaatcaaactccgtaaggtatttttcagaggtttattctgagccagtatgagtgaccatggccccggaaatgcagtcttaagaggccctgagagagtgcgtccgggacagttggattacggcttagttttgtacatttcaggcaggcaggagttgcgagtgaagacatgaattaatacatggaaggtgtattttggatcagccccaaaaggtggaatatcttgaagcagggacttatagatcatcagtggacctagagattctttaatttgcaactgattaaaggagtagagctttgtctaaaaatttggagttagcagaaaagaatgttttaagttaaggaagtttgttaaccaaactactgggtcagagtgacctgtaggggtgcatgacttaccccttgtctggcacggccttaggtcctgtttataattggtatcctattgtcgcaaagggtctgctctgtcagtcttctgatctctattttagcatgaatgccaagcagtggttttgtctaaactccaaaagggagggagtgtaacgaggcgtgtctggcctcccttcctgtcatggtcagacactcattttctaagatttttctggggtcccctaggccaagaagaggtactcagctggtaggggcttaggattttattttcagtttacagagagttattgatagaaatgcctccatgactctgatggcttgaacgagaattctctctctttcagtctctttctcaacactcaaggtagaattctcataaaatacatatgatgctgccaggcgtggtggctcacgcctgtaatcccagcactttgggaggccaaggagggtggatcacctgaggtcgggagttcgagactagccagaccaacatggagaaaccctgtctttactaaaaatacaaaaattagccgggcatggtgctgcatgcctgtaatcccagctacttgggaggctgaggcaggcgaatcgcttgaacccaggaggcagaggttgtggcgagccgagattgggccgttacactccagcctgggcaacaagagtgaaactctatcaaaaacaaacaaacaaacaaacaaacaaacaaaaaatgaaaaacaccatatgatgcaatacctagatatgttctgaacttcatacttattaattctcatgtataacatatgctccaggcggtagcaagaatgtcagctcaggacagcctggtcctcactcatctgcaatgaaagactctcattcgtggtgctgggggaaggatttaactgtagaatgttgaatgatcatgtgaataaattacatagagacccagaatacgttatatgatgatcagccaacttaatcaaggatgttctgtccatgagtaaagtatttggaatttgtagtattaagaagggagggaagtccatgagatgtggctgcagtgaagtgctatatcatgtccctggttctgcttgtaactgtgaaagctgctgcttttttttttttttttaacttgcctccacagagaaagtgaaagctcacttgagcatgaacatagctcacagtagcctctaactcctgggctcaagtaatccttccacctcagcctccacagcagctagaactataggtttgtgccaccatacccagctaattattttattttattttttgttgagatggggccttgccatgttgcccaggctggtctggaacttctggcctcaagctatcctcctcccgccctggccactcaccgtgctgagattatgggcatgagccacagtacctactcaaaagcttcttaaatcagatctgggctggaactggactccaaaatgtgggaactaacacatgttttatcaggctgccagctgaggggactttgctgaatttgtggtctcaagaccctgggagtgacagctctcctcccttcccgccccccacacaccagacacacacacacacgcacacagacacacacacacacacacacacacacacacacacacagagtcaccagtcaggtatgcagagatgagaaatgagctgaagatcccacctgctgaggtcctgagactcctggccacacagaacaatagctcctattccctgagcacctactatgtgccacacacagctctaggtggctttgtaaaatggcccgttggtcaaatttacataacagggatgtagcaccttcccgcagctcattttctagagaggatgcccctcttccagcctgaggagccgctgtcaatgccagggagctctcctctagttgtaaccaagtggacgctcattcagcctgggccacttacattctctttctgggggatggggaactgggctcagaaatacatagaggccattgagaggcaggccccagccacccaagcctgggctggtacttgcagatgggagctccaggtttcctacctacagagagaggaaaatgaaccagcaaatgtacagagaggataaggaatagaggagggtgcgggatggagctgttgatcaccaaagctccagacagattccagccctcagctcccagccttcctgagaacccaccttcccgtagctgcactgactccatggatgttctattgtactgggtgctgctgggggccaggccttgtggccttgttccagggcccagtgtgcagtactccctgtccagggcacttccactctaatgggctctgtgaggcacgtccattcttttaaataaatctttgtttactggagtgagcccaagtagatttctatttcctgcacccaagagatgtgtcatgaggaccaggttggtatggattttctcagtctacagaagatgactgggaggctccgaagaggcgagaagtggcccaaggtcacccagacgcagagctggacattttatttttatttttatttgtttttttatgaacaaggtctcactctgtcgcccaggctggagtgcagtggtgtgatcatggctcaatgcagcctctacctcctgggttcaagcgatcctcccacctcagtctcccttgcagctgggatcacaggtgtgcgccactgtactcagctaattaaaaaaaaaaaattatagaaacagggtctcactttgttgcccaggctggagtgcagtggttcgatggtggctcactacagcctcaatctcctgagctcaagccatcctcctgcctcagcctcctgaaaagctgagaatacgggcactcaccaacatgcccaatttgttttaatttttctacaggcaaggtctctctatgttgcccaggctgatcttcaactcctaggcttaagcgattctcccaccttggcctcccagagtgctgggattacaggtgtgagccctggcacctggctttgagctggattttgaaagcagcacatcatcttgaagcacactcacttcccacagggctgtcattgcctcgcaggggctaaaagagttcattctgccaaaagagttcggggccctgcacccagggtaacccctggggtcaatagcagaaaccccaaagggtgctgggaaagctctgctcatagcaacacaccctccagggtgttttgaatgctatatgatgttgattcccaccacagccctgctggagccacagcacaggtgttacttcgcttttacagttggagaaaccctgagcttggagcagccaaggggcctggtgcaggaggggcaggactccacccaagactcctgacctctgctcttttcaccgcccagcaatactttaaatctgcacctaccttttacatcatctcctctgatcccttccctccttgggctgtttgctatttcttcttggcccagtctcctctacaaatttgccacccaacttctcaaatatttttcaccccttcccagtgaagcccccatctcccctaaagtcagcctccccttgtcttcctcacacactctcttgaaacacaccacaaaccaaccactgtgttctcccctcccctaaaccactctatccaggtgcatggtaccccatcagtatcaccgtctccacctaatggccaggagaaacctgaagtcagcagtggcttcagtctctttctctttctacgtcattcacaacatgtcagcatcactggcgaagtttctgtccaatccaaccacttccattgcttcaatgtatctctgtcctgtctcaactggatggctgcagtggcctccggagaggtctttctgcttcctccattgtggctgagtctattctgtaaacagcagccaggggcatccccgtgcatcctttggataaaagccaggctggcaccaggtgcagtggaatccccagggtgatgttctcccaagaccagcacaggagtgtcgggaaagcctcatgctaaaatgctgattcccggccctgagcccatccctgcaagtcagagtggcttaggatggggtgggaattgctgtttaagaaggtcccagctgatttttccgcacgccaaatgttgagggccatggaggattctgacaggcgaggaggaagggctttggaaggaaggagccctcggtccctgcagccactgaacaaagtcagaatctaagctcctgggctggggctgagaagcagctgagggtcaggagcccagcatcgaacatccggccctactactgcctggacgtgcaggctccagctgaaggactctcttcgagaaacccatgttccaagtcacaaaacgagatactgacatctgcctggcagggctgccgtgtggattaatacctttgcagtttacccagtacttagcacaggtgctaaatgcctcacaaatgtgggcattatggtaattagtgatgtgtcttcccgaaaacatcagtgattttctggttgatggatttacataacttgaaggccagtggggcttccctgtggaatgtgcctcggattcccaaggaacattattctctgttaccctctccttacacacacacccctaacacacatatgtacacatgtacctgcacacatacacccgcctaactcacatatgcacctagcacacatagacacatgcacattcacacatatacccacctaacacacacctaacacaaatatatacacatacacacgcccacctaactcacacacacctaacacacatatacacgtgcgccctcacacatacacctgcctaattcacatgcacactattggcacacatatatacacatatacctgcacatacacacccatctaacttacacatacacctagcacacacacatagacactcacacacccctcgatacacacctatccacgagccccatctcagtccctgcgaggctcctgctgcgcccagcaccgtgtgtggtagggaaggacttggcaggggtctggagtgggaggcgctggcccgtggtctggatgcccaaggctggcgctctgcttccctctctttaactcctcagggactaggaaatccttcctttccctttctggggtttcctaagtgctgtgagtggtgctacctacttaggaatcagttgatttcattcttctgacaatagtttgctccaggtcagtttgggactgcaaataaaagattttctttattttttggcagggagggacattccactttttaaatcagctttctgaagcatgatctccatataatcacctagaagcgtacagcacaatgatcttgacagatgccagcatccttggaaccactgccaccaccaacgtctcaaaccattccatcaaacccagaacactcctggtgccctgaagcgtctcccttcagtggcagaaccagcagagattcagtggtcacaaggtgagtgaggcggcctgggtctggctcctggccattaattttaaataatttgcatttaactttgaaccaccacacctggccatattggatagtgcaggaggaataaactcactggcacatccttctggggcgtctactgtgtgcccccctccaagcggagtgtgtgggaacagagagcagcatccctgccacagtgggtggcggtctgcttgagagatattttattttcttgaaacaaataaaaaagacaaaaggatgcatggtgtaaacactggtggtcaggctaaaatcaaaaaaccattagtgggcaacacagcacagagtgggctctgcccaggccacatgtgtgcagtgccagggctcggcttcagacccagatgtccacacccagccctgcctattacacaaaggcggacagagctgtgggccagcggctggcaaaaggccttggggcaaccagaactctccatcagggcattgcagcctttaagagaaggtgggaactgctgcatttgccccgccctggatctcagcccaggaaacccactgtcacagaacaacagtcttaggagctttcttatcgagacagtaggaagcttttaaacacatcagtggtgaacgccaggcgggtctctggaactttttcatcttggaaaactgaaactctctactcattgaacactgtacacttgattgagagcaaattgtatgtgtttttgccagcctcttcctgaaggcggacatttgtcttgatctgtattggaattctttatctatgtttaaattttgtatgagattgaattcatgtgtatgtgaactgaaatgaaattaaaatgtcaaactacaaaaagggggatatttttatttaaaaagacaacagtcatcccataatcataccttgtgcccccctaggctggcatgaggcaatccactatttgtaagcatagacttggggtcaaggtccgcattccacctcttctttaacttctctctaactcagtttcctcatagaaaaataaaagccctgacttcataggaccatggtgatgatttactcagtaaggtactcagcacaacatctgatgcagagtaaaaattaatgcatgtctaatgtttactatattccagccacaatgttaagctcttcatacaaacatcaaccctccaaggtggatgtgattattagtcctactctcaggatgagaaaactaaggcatatgactaaattgcatggtgctaataagtaattgcaccgggattaacactcaggcactctgattccagtgctgtgtttttaaccattagagttaagtgcctgtatttgtttcctaggtctgtgtaacaggaattatttatttatttatttgagtaagggtctcacttttttgcccaggtgggagagcagttgtgttatcccagctcatgacagcctcaaactcctgggctcaaccagtccttctgcctcagcctcccaagtaattgggattacagggatgcgccagcacacctggcttttttttttttccaattatttgtaaaaatgatatcttgcttttttgtgcaggctggtctggaactcctgggtgcaagcgatccttccacctcggcctcccaaagtgctgggattagaggcataagccaccgcgcccagccaggaatggattttctcacagttctcgatggcggaagtctgagatcaaggtcttggcagggctaggtctctctgaggcctttctccccagcttataggtcgccgcctcctctctctgtctttccttgtcttccttgtgtccacagttgtgtccaaattcccctttctcataaggacgtcagtcatgttggattagggccctccctcctgaccttgttttagcttaatctctgcaacttaacccttaacctcagtaaagatcctatttccaaatgtgttcacattctgaggtcctgaggattaggactttgaaaggattaaaacaggctcttctggcatattgacaatttcagctaaagactcttgagaaacagcaggtgcaaaaagatcacagtgacctccatgctgtaccttgagatgaaattccaatgcgaaagatgccctctccaccctagaagggaaagcaacatccttatctttgggagtgaaaagtccaaactgagagcatactgtgagtacctcattagcatcattccattctctgagcttccccgcagacttcagttgcttcttcacagctctgctctttgtcccgtccaatctctgagtaactaactcactgcttctgcaggtcttcatttctgcaggagggctcccatgctacataaatcctgcattacacttttctcctgttagtctatgttatgtccatttaattctcaggcccagccgggaccctaagaggacagaggtggagtttttccacccctacaactttacccaatcacaattcaatcctaacagtgcctttctctggaggggctctgccagcatgaattcctttacgggtggaagcctcacagtccagtctaccagtgaggtccacatgggattggctggagggagctacgaagtcaagcggcgtcaggtacagagaaacaaatcccacatccaagggccaggaggcggtagagcaaaccacgcacagccgggtgacttaagggcaaggaagtcttcctgcaggaggtgaatttggcacaagggatacgtttttaggccctgagtggaggatctgggtttcaaactggacttttgaaaaacacactcttattgtagaagggcctgcgggtttgttttaatcacttctcaaagctacgctaggcattcgcagctcaggatccccagtttagcctaataaaaaaaagtaattacatcatattacagataatttgattgtgtctgagacgataattgagttaaaacgcttattgtaacagacacatcagattggcaaggaggaagctcggcttaaatacaaacagtgttgagagtggaattaaaggattgccattgcagttaatccaatagtaattattttctgaacataaattcctgagtagtgaggacacaattatatctacaaacagtcataagaaaataattactccacgttccacctgaagcaacagtccataaaagctctggtgccgctctccaggaagccgggctctttccatcagaaactcacggccgatgccagtactgagaaaagggctcccaagcactgcgggactcaccaggcagcttatgacaggctttccaagtgtgattgctctgcccgcgtgacacccaggcccaccgtgtatatgaccaccccaacaggccgacacttaagacaccccagaggatgaacacgcacgtctttcgttcacagactgcagtctccagcctcaccccctgggccacccaccctcccccgctggactgacagccttcccgtaccatccagaggccatggcctactttgtcaaccctcccttgtgaagatcctcatcttcctgccatgcctgcccagccagactctagccctgcatcagccagacccactggtagatgtcggggcgatctcacactcggtcctggagctgcccaggaacctcactgtcctcctgtaatctccctcgctctccttggccacttgctcacctggtgagctttcccctctccaaagcgactccacctcctactccagatcctctccatcccaatccacagagggcatgggataaaggagaagccccagacaggaacttcttcaacttctgcctctggccctcaaagacgcctgcaaacagtgtcacctgtaaagctcttctgcttgggttttgtcctaaggagatgcctgttctcctcctcactcaggctggctcctcacagtctccaatcctgtcccatcctgactcctttgcaagcctcctatgtgggcttcggtgccccccacctcgaaagcttattccctcaactccacgggcacctcagtcaaacttccggaagatctccctccttgctcagggcagcctctttgcaccctagcctctgtctcagcatctgctagcatcgctctcgcagcaggagccgccctgctctgctcaccaagatgctgccagtgtagctgggccggagctctgcaccgcgctggagtcccgctctccccagagccccggccctgctgtgtgctgctcctccgtttctctgcaactccctcctgggcctctgaggttctttcttgtggctgctccataaaacttggtgatggccagtgttccacttctaccccagcctctttgctgccaccttatggtattctccctggtgatcaaatcctccctgaggtttaaaatacactgatgcccccagttctgtatctccaggctgaatctgcatcctgagctcagcttgtctgaatgctgtgcccactgtgttctctcctgcgggcttgctctctagctttctctctctctccctctctctctcaccctctccctctctctctttccttctctctctctccctctctctcttctctctctcctcctctccctctctctcttctctctctttctttctctcccctccttctctctctctctccctctctgtctctcccctctccctctctccctctctccctctcctcctctctttttctgcctcctctttatctctctctccctctcctcctctctctctgtctctccctctttctctccctctctctctccttttctctcttcccccctccctctctctccctctcttccactctctctccttctctctccccctctccctccctctctctcccccctctctccctctctctctccttctctctcttcttctttctctcctcctctccctctctctctgttctctctctttctttctctcccctccttctccctctctctccctctctgtctctcccctctccctctctccctctctctcctcctctctttttctgcctcctcctctttatctccctctctctctcctcctctctctctgtctctccctctttctctccctttctctctctccctctccttctctcttcctctctcttgctgtctctctccctctctctttcactttctatctccctccctctctttcctcctctcttctgtctctccctctttctctccctctctctctctctccctttctctcttccccctctctccttctctttccctctctctctccctctctgtctccttttctttcttcccccctccctctctccccctctccctctttctccctctcttcccttctctctccttctctctctttccttctctctccctctgtttctcctctcctcctccctgtccttctctctcctctctctctcctcttcctctctctctcctcttctctttttctctcccactttctctctctcttcctctttctctctccttctctctctctttccatctctcttcctttctctctctctccctctctctcctcctttctctctctcccctatctctccctttttctctctctctccctctctttccctttctctccctctgtctctcctctccccctctccctctctctctcccctgctcttcttctctctcctcgctctcctcctctttctctctctccccatctctttccctctttctcgcctctccttctctctttctgtccctctctttctccctttctcctcctcttcctctctctccctctcttttcctctctgtctctccttctctctctccctttctttccctctctctctctctctccttctctcactctctctctctctccccccacccccaccaattttcttctgacattttctaatctgaggttgcgttactccatgtgcctggagaagacgatggcaacataggattctgcatgtaaggattttcctaagggaaacagggttggaagaaaatggagggaaagtgggaaaagcctggagaatcatcaaaaggaggtgcaaacctgaccctaaatgaagggaagtgggagggaagcttgggtgggagccacctagaccatggtacagtctagggaacgtccaccaaggctgtaagggaagcctccagccaaaatcaaccagcagagtggtgccttctcccagtctgccagggcttgcctgtcttgggagccctgcctggctcagacatgggctgggagcagctcctgggaagctttggtgtaaacgctgctcagagcacagaagcttggtccagatccctgacgttggagatctgtcaggcgcattcccaggtcacggtagcgaaccagccccactgacacgggatgcttcctgcagggctccctggacacacattcacccccagtgctgaatccaacggattctttctgtactcactgaccatcctccttctccatggagggggttaggctccaggccctaggagagccaggctaagggaagagatgggaaaacatgaaattgtttgaggtagggggacatggagagggtagatgctcattggctgaagctgaggggcaggttaatgcaggaggggcaaggaatggcccccagccgctgtggcctgagggaggctgcttgctaccttgatgcaacttttaatcattatctcattttagagattagtgtatctcacactttgtcatgctgcaagaatgccgtaagctgcagaacttggcaaccagagatttctgggctctatttccagagaagttgcttttctaacaaattcccagtcatgctgatatcgccagcccagagaccacactacccaaataattttggtgagagccactttggactgccatccctagaggtggcttcttcttttctgaggaggacacccagggcccagggacatacgtgtttgccttagggagctcctggccagagccaggccatcctctcatcccaggcagctcagctccgtttgcagtgcctccatctgggggaagaaaagggaagaggtgtcaagcccagtcaaaggcaggagagaccaatgtccatgccggtctcatccctggggcctgttgtggtcacatttagtcctgccgcctactgggggctgctgaagtttgccaagggaagacattctcttgtcattggggtgacactgcaaactctgcctcctgggttcaagcgattctcctgcctcagtctcctgagtagctaggattacaggcatgcgccatcacgtccggctaatttttgtatttttagtagagacaaggtttcatcatcttggccaatctggtcccaaactcctaacctcaggtgatccacctgtctccgcctcccaaagtgctgtgattataggcgtgagccatcatgcctggctgcaaagggcattttgaagctcttgtccctgatcaatccctccatgctgcagatgagggcacaatcaagggcagagaggggagagggaggagcagctcttagtagaaacggttttcttagtgcatcctgtgcaccggtggatatgcacatgagcattttctcttcccgttttgctccaaagcgtgtgagatgtttgtgctatggcaaatacaacacctgtaggagtgtgttatgggttgaactgtgcgcccccagaaagacatgctgaagtcccaactctcaggatctcagctgtgacctcatttggagacagggtgattgagatgtgatgagttgagatgcagtcatcctggagcaaggtggcccccagtccatgctcactggcatctttacaaggagacagccttgggaaggcacagggtggcagggagcatgccatgtgaagacgcaagtggagaggggagtgatgtggccgccagccggggttggactgcctggattgtcaggagctgggagaggccaggaagcacccccctcctgaggctgcagagagtgcatggccaggctgacagcttgaatggtttggacttctggcctccagaactgtgagaggatacatttctgtctattacagaagctctagaaaagtcataacagaaagtgtctgaggaaaggtgcctgggggttcctggaagtgcctggggattcctgagggtgcatgggggtttctgggagtgcctgcggtttcctgggggtgaatggagttcctgggggtgcctggcgcatagcaggcagggacagtgcatgattgttctgctggcagtactgggggctgggctggccaccccaaatgttaccctgggcatctgcttaacagcccaaacagagggaataatagaccctcaaagatggctccgtccctgaggcctagagggctgtgtgagagctgacctcaaggccaaattcttgccccctctctctgttggtccatgagccccaggatcctcttcctggctctacactgaagcctggacttggaagctgccatcctaaggcctgcatttaatcaggagaacctgaggatgtctaagccattagaataaatcacacagatattccttttggggtgtttgcaatcacttcataattaactgacggcttcatagcagccactttcacgtgtgtccaatggtcacataacaacatcgcctactctgtgtctacaccacggcagcgtgggagggctggacgctgagggtgcatcctgccacctctgcagccccggagccctcccccagcaacaggggttcgtgggggcctgggcatcagatgggtgctcagtgcgcctcccctctcacctcatcatgaaacctactgtgggtcctctcgcaacagcagcacccttggtgaccgcctgcggatgggccactgtaccggacattgtgctgacaatgtccacgttgtcctgtggattttacagcaaccctgcagaggggagtctgaggcttggaaaggtgacatgacctgtctgaggacaaggagtcagtgagtggtggggctggggctcagcctcagccgttaggctcccgagccctgctcacaaatcagtgtcctggggagggcagcatggatttggggtttaaccacctctgggctgtctttctgcccagcactaaccctcggtgtccccctgtgggctgcagaggggctagggctggggacaaggtgaactgcccactgtctcttagtgagataaatggaaaatgaataaattccctgaggtaagtggtcaggcaggacttgcaaaaagtgaaatgattcaataatttgatttttaaaattaatgaatgaattaggactctttttgagacagggtctcactctgttgcccaggctagagtgcagtgatgtgaacacagctcactgcagcctcaacctcctaggctcaaggatcccctcaccgtcagcctcctgagtagctggtactacaggcacatgccaccatgcccacctaatcttaaatttatttttaatatatttaagatggggtcttgctgtgttgctcaggttggtctcaaacaccttggctcaatccatcctcccacctcagcctcccaaagtgctgggattacaggtgtgagccacctcacccagccaatagtaagattttgctaatgattttagatgctccttcaataggttccctctctagctttccccaactgttgccttccagtgcagctgtgaaagggaaccaagagagcccccctcccatccccgctctccagaactgcccactggtggaactatctcccgcccctcccctctccccatccctctcccattcagggcctcctggaggtcgggtgtgccacacgtctacatgcgctgttcataaccagagggtctgaagtcacacgattcggggtccagccgcaactctgccccttgtcagccaagtgagctcagagaattcacttcttctctctgatctccaccttcccatctagaagatgaagacacaaaacagttttccttcaggtggctcattgacctactctacaaatatttcagagccttttctgccaggccctgttcaaggctctgggtataaatcaacgaacccaacaaaatcccctgctctagcccaagggaggtgagcaccaaacaaagtagagtatagggttagaaggaagacaaagcggagtggaggcgtggggtgcccccgcacagtgaagccttctctcccgcggcaggaacccctgggctgcagctggggaccgcgggaccgtgtgcaagacaggagcactgagcctggagagggagtcccaaggacttcgtttgagtccctgaacacagcgttgcctgaagggacatctgccctcctggtctttggaattcttgaagctaattcactttccccaacccctaccggactttccctttttatctaaatcagagttggttttctgtcatcgtcatttgagagggtcctggctcaggcacgtgcttaaatgcttctagtttgtttttccttctatttagagggtacgatgatttcactgtgcacctgcagtgggggtctgagtctgcaggcaggaggagagggctcgctgctgagtgatgagcgcacctccccgtcctctctctgtctggggagaaccaggcgagggaggtccaagccctcacacccattgggagctcagcccccttttctgagagcacttccgtgtcaccgtgtgcctgtggactcctttattaattgctccttagagcctaaaacccagttcttttatgaaaattatgaaaccatcaagcagcctgacaatgaaaataatgcctctctagtatcaatgttgtaacactccctcccgtgtttctgagcaatgcattcatccctgtgagtgtggagcaggcaggaacctgagtggcgtgaataatggggccctccgcagcctcctacaaccagggacagggctgggagtggaaggcaaagcgttgttccatcaggaatagattattcataatttcatgcccttcggaccagccagggtcattaatctacggagagcctcaagtcctagaatggtggaagccttgaccgcatgcaatgcagtgcatcagagtcctggggtggagaccatcccatccttcccaggccatgctgggggcggcctccaagctcccacctgcaaaccggaatagagcgagaatgttctatggaggtaacaactttggacataaacatctgtcatttgggcttgtgcaggtggagttgagctcctgtatatcctgttcagaaggggaggacttggggtcagaggaagtccgtgctgtgctcctcctaggaccccgcaccttccctgtgctgggccgcgggtgtgcgcagtctgactccatggcacacgctcaagtggggtgtgtgcagtgcaggaatgctgttttgggggcgggggctttgcgccactcctgcagtggggaagggggatgtccaacttcagcgcacagtggggagcagctggggcaccgagagctccttttcaggattcttatttgataggcgagaaaggagggtgggagagtccagccgctcgcatgaggttgcacagctggtaagggtggggctgggagacacaacctgtgcccagggcctcactcttagtcgccacccctgagggccttcctggcacacacactaggtgtccagttctgttctgcatgccggctgtccccagcagggcccaggtgagcacatggtggggagagggctgaggaggaagatgtgatccaaaaggtcagttctaggtgttgggagaagcagtaggtgtggagagggggtgagggagccctgacttcctccccaagcaaggctttcctgcacaggtttttataggggactctgacagtagacgactgtggggtgactgagtgctgccaagctcaggaagctggcggcagggggaggacctggaaatgccttccccggaggagcctccagcgtggagcagcagacaggcagactgtaaataacagaggagggtaatgggaatacagcagggaatacaggtgtgacgcctgcaagagccccaccacatccattctgggagatgcccccccgccactgccagccctgtccagcctggaggggggccggaggaagacagctgaactacgcccctctgattgagcagagggcaaacatcccctgcctttgttctccttaatctaaattgaatctggggagggggacgattgcaaggtggaagtgaaaacccagctgcatttcaaaattacactgatcaaaatggaaatggtctggaggttttgaggagggatggctgatgcaggtacaaaccttacttcacattaattggcacccttttcagggaggaaagggcaggaataacttcataatactataaaccaagactgtggccactgccatctgtgctaagaagccaagggagactttgaggctggaatccttgaccctcattgtctagaccctgaggcctgcagaggtccagaggcatcccctgctgcgtcttctcaagagtgaagatctcctgccctgatctcacagccttctctgtcccctctgacactctttgacccaagtctcaacagtacctgcccggttgtggaggcaaaaggtgtagaagaagggtcagtagcttggaactggctgtagcttggagcccagccctacctccatctgcttcaaggccttccctgagtcattggcccttacagagagcattctcctctctccacacctgcccagtctccagggactgccctgccaacatcctcaggatcactcattttggtcagcacagcaaggtgcgggtcagtgtctccaggattccagaatccatcccaggagctcaccctcacactccttcccttagagcatataggaagatatcccctatatacacacactcttatctctccttgaaattaagcagtattcactcagcctgcaggaaagtagtccaagactttttttcatgttaatctaaattaaatctgcaaatggaaagaaggcctcatgtgagaagaagccaacctcatccagttgctggccgaatgttggagggagagcgagtgcctgggtgagcaaacgcgtcgttgtgaaatgtgcatcctgcgcaggaccatgtgcacatgtgcaggtgtctggggagggagcttgggccatgattcccaacctgcctccagggaggtccctggcattctagatgttctgtgtttaaaaacagcctctccagtggtttcaggagtgaaaaggataaaatctaagagctgtgtgaccccaccctacctaaacctttccgcctaattaatccaggactcagaagcctcaggaccattgctatgcctctgaggcagatttgggctccctgaagcccacatggcccaagatagcttggtctgaaacctcagcatccgcctcactcctctgagctaagccgtcttggctccagagggtctttgacagagtgtgaataacctgggaggtttcatactcatcaacacagcagccttgggccggataagaaagggcttgctgcctggtcctactggagaaaacctggaatttgggccaccagatgggtgcccagggtaggtgggaaaacaaagttctccaagtgcgttaagctgctgatctgatggggctgccaggtaaagtacaggatgctgagttaaatttgaatttcatgttggtgatgaatctttttaagtgtaggtatgtcccatgcaacatttgaggcatacttatactgaaaaagtgtttattatttatcagaaattcaaatgtaactgggcatttttaatttttatttgctagatctgtccatcctagctgctgagggcaatggcatcttgcaaataagatgcagggagcagcgatcctagtgagtttccacccaaggatccagcctttcaggggacagtgcaccccacgccagctgggaatggctgaaacactgggccaaagccaccagttctcaaacgagttgacagatggaatcctgtctttattgatatctgtctagtgaggtcttccctgagactgctgtttgaaggcataggtgtgtcccaaacgtgtctgtgtgccctgcagggccagctcaaccccaggcagtgctaagggccaacaccttggggctgggcgccgtgttgcatgtctgtaatcccagtactttgggaggccgaggttagtggatcctttgaaccaggagttcaagaccagcctgggcaacatagtgagacctcatctctactaaatcaataaacaaataaaggtggtgcgtgcctgagtcccagctactcagaaggctgaagtgggaggtttgcttgagcccaggaggtcaggaggttgaggctgcagtgagccatgatccactactgtagtccagactgggtgacagaacaagatgctgtcaaaaaaaaaaaaaaaacaaaacaccttgggtttagttccacttttactggacacaatctctctaacactatgtgtcctcatctgtaaaatggggtcaatcatctcttctctactggtcccacagttgcttgtcacgaataaatgataagttttaggaaaatagttggtgaactgtaaaatatttcaaatcaaacatcctacagtatttgtgttgctgtcaaaatacgactattacattcccctgagcagagatgtcttacttggttcctccctccttggtgggagcagccccaccttaccaaacgggtttcccagaaggctgttacagaaggtctcggtgcaggatgggcttgcttcggtcacagtggcatggcagccccaccacggacatcagcagccaagcctccaccagatgctttgaccaatgttgcaggcaataggaggcactagggaggcatcagcacaccccagcttggactgtctgtttttaaataaaataaaccctgagccaggcgtggtggctgatgcctgtaatcccagcattttgggaggccgaggcggggcagatcacctgaggtcaggagttcgagaccagcctggctgacatggtgaaaccctgtctttactaaaaatacaaaaattagccgggtctggtggcgcatgcttgtagtcctaactacttggcaggctgagacaggagaatcgcttgaatccgggaggcagaggttgcagtgagccgagatcatgccactgcactccagcctaggtgacagagcatgactcagtctcaaaaaataaataaataaataaataataaataaataaacctgcaagggatgcagcatgtcaggaacggatataattttaagtgcttctaactgaaatatgtagattgatagctgaatcacaaggacatctcaacatacatacgtttattcccacactttcaaccgtgtactcaacacacctttcctcagcccacagtgagtccggtcttccctctgggaagccgaggcaggggtgctccaggctgctccacgggagatcgggggctcctcagacctcccctccccaggcctagcgattcagtgtccagcttcaggtcaggcccggccccactccccacctgtctttctgtctctgtctttctctaggggtcaggcggagctccaccagtgtctccaactcaggtgctggaaaccagtcacagcactgggcttggtgacaccaggccagggacctagcagaccctgtgtagagctgatttcttgctcctctacacagggggtggggctgctgcccttcagcagagcctcggctttcatttaaagccagcagtttgagccctgccacaggacatagtcagagctttgccgcagcctgctgctcccggggaggcttccctgattgctgcagcttacaccacgctccctgcttcctttctgcttctcagtggacacgggtcagctccctcatcctgcctggggcgtcctcagctcctgggcaaggccagcagctgctctccatgcccaccgcaggggtgggaacacagaggtatttaggttgcgactcaattagaatttttagaaatctccccctaagtattttccaagctagtgaagaaacagaaacccataacaaccacgaagcagccgtgtgacagcagcacgctatggtactggagcaaggagatcagccctgtgctcaacaggataaattttttttttttttttttaaagacggagtttcactcttgttgcccaggctggagtataatggtgcgatctcggctcactgcaacctccgtctcctgggttcaagcaattttctagcctcagcctcctgcgtagctgggattacaggcgcctgccacttaatttttatatttttagtagagacagggtttcgccatattggccaggctggtctcgatctcctgacctcaggtgctttgcccacctcagcctcccaaagtgctgggatcacaggcgtgagccacagtgcccggccaacagcatgaatttttaggaccctgcaggaggaaactgtctggggcgcagaaatgggttcatttccacccaggaagctcagctgcccaggaaggtcacagaactgctcgtgcctgctagactgggataggacagagcagggacagaaggtgaagggcagatgccttgtgcatttgggaggagaacggagctgagaagtaggcagtggtggccactttcagccacagcttcaccaggctctaacatcagggggcacaggcctggtgacagccccaggacctcaccacctgggtcaactaccccttggcaatcttctctaggctttgtggtctttgtgtcactctgtctcctctgtggatttttcattatgggcgtaacaattactggattgatgcgtcgcctttgaaagccttgttggaagcgtgtcgctttggagaaatgtgctcaggggaagccttgaacatgcattatccgccccccaggtaggcaggcccctgtcttgagagcacacagggcatcttctcactccttagatctcctgagaggtgcctggcgctggggtgttatcaaccatggtgatgtgatgggagaggcgcaccagggagtgcagggaagagcaggctgacttctggctctacgaagctggagaaccctgctagcatagcacaaagagcgccggactgggtgccaggacagcgggtcccaggcttgactctagctgcgtgtcatttggcattgcttcctctctcagtgtcctcatttgcataattaggagacagaatatttttccaagagttgctcattcattcatttaagaatattgcagaggccggaagtggtggctcacgcctgtaatcccaacactttgggaggccaaggtgggcggatcacctgaggttgggagctggataccagcctgaccaacatggagaaaccctgtctctactaaaaatacaaaattagctgggtgtggtggcacatgcctgtaatcccagctactcgggaggctgaggcaggagaatcgcttgaacctgggaggtggaggttgcggtgagctgagatcgtgccattgcactccagcctgggcaacaagagcaaaactctgtctcaaaaaaaagaaaaaaaagacatgtctgtaattccaacactgtgggaggccgagggggcagatcattcgagaccagtctggccaacatgccaaaaccccgcctctactaaaaatacaacaattagttgagtgtggtggcacgcccttgtaatcccagctactcaggaagctgaggtaggagaattgcttgaacttgggaggcagatcgtaccactgtaatgcatctccaaaaaaaaaaaaaaaaaaaaagaaagaaattgaatattcctgggcgcagtggctcacgcctgtaatcccaacactttgggaggccaagggggaggatcacttgaggccaggagttcgagaccagcctggccaacgtggtgaaacctcgtctctactaaaaatacaaaaattagccaggcatagtggtgcatgcctgtagtcccagctactcaggaggctgaggcaggaggatcattcgaacctggaaggcggaggttgcagtgagctgagatcacaccactgcactccagcctgggggacagagcgagactccatttatgaaaataaagaatatttattgagtgccttttatgtcccaggcactaatctgggcatttgagctacaggagtgaaccaaagaaccctagtgcaggagcaggggagtgctcaaaataaaacttgaagcagggtggtctggagaggccccattggaagactgtctcttagcgactttcttttccttcaacccagcaaggccaggcctgtgggtgaagagttgttcatttacaaatagactaggccaagaaaatcttaccctctttgcaagtgaagatcaataactcatgaattcaaaactaggtttgtgaacaatgatgcttatgttaatttaattttatcagtaggtttaataatgtcttattaattcaatagaaggctttttaaaaaaaataatgaaaagctgcatttgaattagtcttgaaccaagcagggcgctgaccttggtctcccctgacgatccacaaataaggcttttttgtggacgagtcgtgcctgctccctgccatgcatggttctttccatcccgccccacactggtttctggcatctggcttcgcctgtctgatgcaatgcagagaaagagatccagagggaaacgtggaaagtgggagatggggtggaatgtgtggagggagacttactctcaaggaagcagaaagcagcttcttcccagaatctctttacaattggagaggccccatcagctgtggggagggagggctgctcacacctgcctgtgggcagcaggtagaataaattatttctagaggctctttgagcaacactggagtgaaattaggccaccttccacaattctaggatcctgctgtctacccccagagcctgatcaaaacattactccaccaatcccaccaggtcttccagggctgtggggagaaatgtctttgttccggataaccagagctgtgctacggcacctctgcaggatggggtagctcagagttggggaccccagcttcctctctctggcagggttggtctctggttagacgtgctactagggagctaggccacgtggacatcacagacaggtgcaggcatttggaggagaggatcacagcagattccgggaagttggtgcccttggggcctggcctgatctttcctgttaagctgtattgtaggctgagcaccagccaactccttctactgcccaagaagggaaggctggagccttggaagtctgctctagataggcctgctggatgtgagaagaaaccaggcaggatctgaggaaaccactggtgctggctgcggagtccagagctgatctcctgaagattaaaagttatatcagtaaggagaaagttggagagcggccctttgggctccagaatcagctgaattcaggagacaggttttgggaggaaagatcctaagcctagctaactcactgctcagtcaatggtggagaatgactcatcaagagtcaagataatgaaaggtggtggagataaagaggatggtgatggtgatgatggtgggaataaagatgaggacaccattcctttcctctgtattcaattccttgccacatgggcctacccaacatcatgtgttttttcatcaaagccagcaaggcagagaagcaataaagtcagctagcaagatggaaattacagtcttttgtaacctaattatgaaagtgacaccacatcacatgtgccatgttcttgcttttagaagcaagttacgagtggccaggccagcccacattccagaagaggggacaactcaaaggcatgaatacgaggacatagggattattggaagcttctatggtttgaatgtttgtgtccctccaaaattcatgttgaaacgtaatcctcaatgcaacagtattaagagatgggtctgttaggaggtgattaggctatgagggctccactcttagggttgatatcagcgtcctataaaggggcttgagggggcaagttaatccctttcatctcttccaccatctgaggatgcagcaaaaagtgctaccttgaaaacagagagccagccttccacagacaccacatctgctggctccttgatcttggacttcccagcctccagagctgtgagaaataactctgttgttacaaatgacccagtctaaggtatattgttaaagcagcacagaacagactaggacaggaggcaacttagtctgtccactgcactaaccctctagtcaaattcagtggtgtaagggactccagatgaaatcagcagagatgaacagcccaaacaactcacagaatggtgagaaaaaaaatgctcttttcagctgctaaattttgggcttttttgttatacagtcagagctaaatgcagtatttcaattttgtgtcagaaatggcatcctgctttaacaaaaacctaaaacgtggcatgaaccttgagactaacaagcagacaaaggctgaaaaagcagcttctggaaaatggctggtggaggctgaaagttcctacaggaagctggggggaggatgacatttgtggtgtaatcatggagtactgaatagccatgcctgtggtcagttcaaagatagaaatatacctcatgaatttgtagatagggctcaggagatatccaggcagtatgcagaatatatcagttggctttttatttctcatatgcatttgataagatatagaaagagggggataaagtgaagaagggactgctgaatttgaaagcagaatttagaaaaaatacaaaagaaccaggattttctgcagtggaaaataaaactgttgctcaacttcagtgtttttcaactagaaaaatatgctctgagtacattaaaacctgggtgaacttggaagggtgctaccagcaaaatatgccctcagggtcaagattaaattaagggtatagtagggaaggtcaaatgcaaacttctgacactgtccctttggtcaagacagtaaataagaagcaatgccacattccaggtaaaatgtcaggaagcagagctcccctcaaagattaaaagatgcaatggttccccctatattcctgagtttaattcactaatacagccatttaagaaccagaggatacatcaggaacacagatggtcatggtatatcagagaagactcctgtggtaagcttaaaggcccctgcctatacctaggccctaatctctgtgagtgttgcctttgtatggcaaaaggaatttgcagatgtaattaagttgaaggtctagagatagggagactatcaccagttacccaggtaaaccctgaatataatcactcatgtcctactaagaaagaggcagagggagattagaatacagaaaaaacattgtaagttgggcaaaggacatggacacttcttaaaagaagatatacacacacggccgggcatggtggctcacgcctataatcccaacactttgggaggccgaggtgggcggatcgcgaggtcaggagattgagaccagcctggctaacacggtgaaacccggtctctactaaaaatacaaaaaaattagccaggcatggtggcgggtgcctgtagtcccagctactcaagaggctgaggcaggagaatggtgtgaacccgggaggcgaagctttcagtgagccgatatcgcgccactgcactccagcctgggcgacagagcaagactccgtctcaaaaaaaaaaaaaaaaaaaaaaaaaaagacatacacgcagccaacaaatgcatgaaaagaaaaggtactcaacatcactaatcatcagggaatcgcaaattaaaaccacactgagataccacgttacatcaatcaaaatggctattactaaaaagtcaaaagacaaaagatgggggtgtggaggtggagaaaagggaacacttatatgtgttggtgtgaatgtaaattaattcaacctctatggaaaacagtatggagacttctcaaataactaaaaattaagttactattccacccagcaatcccgctgctgagtatctacccaaaagaaaagaaagcattctattaaaaagacatctgcactcagatgtttactgcagcactattcacaatagcaaagtcttggatccaacctaagtgtccacaaacggtggactggataaagaaaatgtggtacatatacactgtggaatactatgtagccagaaaaactaataaaatcatgtcttttgcagcaacatgaatggagttggaggccattatcctacatgaactaactcagaacagaaaataaaatattaaacaaggccaggcgcagtggctcatgcttgtaatcccagcactttgggaggccgaggtgggcagatcacttgacaccaggagtttgagaccagcctggccaacatggtgaaacttcatctcaactaaaaatacaaaaaattagccaggcattgtggcaggtgcctgtagtgtagatgctgaggtgggagaatcacttgaaactgggaggtggaggttgcggcaactgagatcgcaccattgcactctagtctgggtgacagagaaagactctgtctcaaaaaataaaataaaataaaataaaataaaataaaataaaataaaataaaatattaaatgttctcacttaaaagtgggagctaaacaatgggcacacacagacataaaaatgcagagaatagacactggagactcctaaagtggggaggttgggagggggaatgagggtgatgggtgcattagaagctcacttccctccattatgcatgtaatatccatgtagctaataagcacatggacccccttaaatctaaaacttaaaaaacaaacaaaaaaggaatacagaagaagaaggaaatgatacaactgaagtcaacactatgctactgcctttgaagatggaaggggcccttagccaaggagtgaagctctagacagtggaaaaggcaagaaaacttatccacttttagcactgctagaggcagcatagcccactgtcaccatcatttcggtccgaagaaactaattttggatttatgacctcccaaactgtaagagaataaatgtgtgttttgtttgttgttgttgttttctgaaatggagtcttgctctgttaccaggctggagtgcagtggggggatctgggctcactgcagcctctgcctcccaggtgattctcctgcctcagtctcccaggtagctgggactgctggtgtgtgccaccacgcccagataatttttgtatttttagtagagatggggtttcaccatgttggccagaatagtcttgatctcttgacctcgtgatctgcccgccttagcctcccaaagtactgggattacaggtgtgagccaccacgcccagccaaatgtgtgttgtttaacaaatttatgttaatttgtttcagcagccataggaaattaatacaaccacccaaaacttacctaagtggtagccccaattatagcagctgtagcagatattgtatttttactagaatagaccaacccaacctctgacataaataacagctattggtctagtgaaagcatccgtttcaattcctatcatcaagacagatggaagacatttgcattcatttgaaaggacagcagcagacactcacagtgttggcaaacctctgggttaacgctcctgctctctgttgcaatatagtccagttagacctgtcctgttggcactccacggaatatcccactagtccataacattgatgacaccatggtaactgaatctagggggtataaagtggcaagtactgtggctacaccagggggtgggagataaaccgtttgtagattcaaggtgacttgtggaatgctggaaagtgcttctcccttgcaactcttactgcaagataaaggtgcaactcttaataagtctcttacctttggaagcagcacacaccacacttgggaacctacatcgctccactcattaaatcactcagaaggatgctgcttttgaatgaaacccagagcaagagatacctctagagcagattcaggctgcaatacaatccccactgccagtgagtcacatgacagaggactggaggtatctgtagcaatcaagatgtggttgcatcttaggcaagtcctaacagaagagtctcagagaataaccctggggttttgcagcaagtccgtgtcctcttgtgttagtctgctggggctgctattacaaaataccacagactgggtattaaacaacaaaacaactaagcattaaacaacaaaatcgtattttttcacaagtctagaagttagtattccaagatcaaggtgctgtcagaactgttttctggtgaggcctgtcttcctggcttgcaaacagctgccttcttgctgtgttctcacatgggctttcctctgtgcttctgaggaaacagagagacctctctcgtctctcttccttttcttataaggacactggtcctattggatagggcccaaccttatgacctaatttaaccttaatgatctccaaacaggtcacataaggtttcaacatataaatttgagggggactcaattcagtctatgacatatctgcaacagaaaattatctacaatttaaagctcctggcatactattggaccctaacagaggctgcacacctgatcatagggcatcaaatttcttcccaatatgatttgagttttgcctcctgagctgggtgttgtcagcccactaattaataaggttaggcaggtataacatcattttatcatatagtggcaataaaacgtttgggattagactgagtagatccagaggacacaaataaattaaactaccacttggcccagaccctcacatcccctatctttgctgcacagatgggtcttcctcattccatatctatggctttatgaatgtttactaccaccagctgaaaaaggaggaaaaacatgtttggtccactgataagttaggacaatatgttgttacaagcccaaaatggactgttgctaccctttagttgcatttcagaagtaaagaagacttctcagtggctaggcttaagcagtacacctggttattagcttgtattagagtgagaaatgacctaagataagaatattcaggacctttggctattatgaatggctttgctggttgttcaggaactttggatggggttggggggctgcaagaggggaaatgtcccaggataaagtatgcagatgtatctatgagagtggccttgaggtgtgaagatagttctatcacatgctcatacccactggagagcacagatgacagaggaggcactgatcaactaagtagcttagatgatcaatctttgcccactccagtgcctgtaggatgggtccatgagcagagaagctacggtggcagtgggtggcagtggtgcaggttatgtacagttccaagtgggctcttgctcatcaggactaatgcagccactgtcattattgaagatctgatggatgagtactagatgccaaggttgagccctccatgggtaccagctccaaagaacagtgtgccagtgggttctccagaaagaagatgtcaagatggagtcagcaatacaaaagaattgttgggggtaatgcctgtgaaagatagagggaagagggggtagactaggaagggcaagcctgccagatgtaaggcaaactttcccaggaggagtgagaagggaggagggctgggtaggacaaaattccatctgagacatgagaaataaaaataaaattctaagcctccacccaactgaatagtaaacctcctcttggttaaagggaccccagagtgaccttgcaaactgaattctcgaccatgacaggagggaggtcggacacacctcattatgtcccctcccttgctaaccaccactacaccttcttccctaagaaccaaacagaaaccagccctttcaacagactccacactggtatcaaccaaccacctaatgctgccactgtcttttgcagtttcaacacaactgacccgcatttttttcccaacaagagaccactgatcatggcatggttctggtgagtctatggagaatgcccagtttttgcgtcctctgcttcaccttttaatgtcagagggctgaaaactccaccttggttcatgctaacaccatattttgtacatgggacccatgaaggggcatgaagctccattgaacatgtgcgcatttctcctttcataaatattcatgactactcctatagcttattaaatatgtatacttagccatcctgctcagcatagatgtctgttcctttttcttctccctccaagggttggtttttcatttctgatcagaggctatgcttcctggcccgtcagaatgaccaccctgcaggctgcaaccctttataagaaataaagctctcttttccaaatttatgaacctcatcattcttcaggtggcaggtgcaactctaagaatgtctctgccagcccaaagggaagttctggcagaaggactgatggctaggaatggtgcctggttccactgcatgaggaatctttggtttagcttgaaaccagaggtaaattctgaaggcacccatagctggaggctactgtcagttaactgagcttctatgactgccacagttaccagctagccatatggtggcaagtggactctattgggcacattgccccatggaggaagctgtgtttcaccctcacttgggactgtttcatattcttaagaataatttggcttctctgccggaagagtctcagtgtctggttgttcagagaatctcacatatcattggctcccaccaagggaccaaatttacaatgaaagagtttccacaatggcagataaccaaggactccaatccatggtatgtgcattggagccagtttgtattggcttaggagagttggctgttaaatattcaagaattttgagaggcagttgtgaaatctctgggtgattgaaattggcaatagcgaaagcatttacataacaaaacttgggcaatctttacaaatcggacatccctcccccttcccctacacacaaaccagtttacaaacacaccactgagaccactggtgctaatacactacatcacccagagctgccagcagcctgagaaaatgctgaaatggccacttcaaggacatgagcatcagattaggaagagtcctttgtgggtttaggggtggtatttttcaaaatgcaatctctatttggaaccaaagactatgtatggtactgtgtccacaatagatagggcacacttgtctgggaaccaaggagtgaaaataggaggagactctgctattaagtcaaatggcccacctggggaatttctgctgcctgtccccaaagcttcaggctctgctgggctagacaccctggaagaaacactgccaccagggacacagtatggattccactgaatctgaagctgcagctgctggcttgtcatttgcagttccttacctcagtaaacctgtaagcaaagaaaggagttaccagcctgacagggtattggccaagcttatcatgaatgacagagttgctgctgtgtaggggaagccaggaggagtttttggagctcagggaacttacttgggcagcaaatcttgatgattccttgtttgttgataactgctaatgggtaacttcaaagccatggcttgacaaaggtatgagaaccaaatgcccagatccatcaggcatgaaagtccaggtgaccaggcaagcagcctatagcatgctgaatgctgatagatggtgataggagcatagaagtggtggcaaaggagtgagatattgaataggaagccccaacctcaggagcaactggccccagctatagcttgtcccacaaaatttcctgttgatgattgacaaactgtgattgaccatgaaaagaagttgttatcagggtaaatttaatgtgggtcacaagtggacctgaggggaaaaaggatggaccatggtgaatgctgttggtctcccatccatattcctcctagccatatcagtgcagtgagccagctgacttcaaattgccaatacctgtgtcttttttcaggaagactttttccaaagtcatattgaagccagtctgcctgcttgtagcacagcctagaaatccaaaaaattaatattcaccaggaccagctctccattgatgatatagcccccatgctaaaaggataaccctaagacataggttctatatcattttctagggggttcccacaggattcagctctagttagccacagttggatctggcttagtaatgaccctgccacaaccatggaaatagaaggggattcctttgttttaaggtctttcttttctctttccctttcccttcctttcctttcctttcctttcctttcctttcctttcctttcctttcctttcctttcctttcctttgtttctttctttcttttcttttttttttttttttacagagtctttctctgtcgcccaggctgcagtgcagtggtgtgatctcagctcactgcaacctccgcctcccgggttcaagcagttctcctacctcagcctcctgagtagctgagattacaggcatacaccaccacgcctcgctaatttttgtatttttagtagaggaggggtttcactgtgttggtcagtctggtctcgaactcctgacctcaggtcatccacctgccttggcctcccaaaatgctgggattgcaggcatgagccactgcacccagccaggttttcttttaaccttacagtcactgtctcacctgtctcattttcccactcccctatcagtgtttcagataccacccagataaataatttgcattttaatccttatagcaggatccacttctaagggaaaccaaaactaagacaagtggatgcaataaatatggagaaaggcagattccaaaactattttttgaataagatttgcaggtgggctgaatgtggcaactgaaagaaagagagaaaattgggaatgatgcctggatttctcacgtaagcaagtgggtagagaagggtatcatttactgagatgagaggtaattagaagtatagaaaattaagagtcccattttgttaacattacatttgagactttttttttcttttagtcagggtcttgctctgttggccaggctggggtacagtggtacgatcatgacttactgcagtctctacctcccgggctcaagcaatcctcccacctcagccttccaagtagctaggactacaggcatgtgccaccacactcagctcattttttacttctcgcttttatagacatgaggtcttgctaggttgctcaggctggtctcaaatgcctggcttcaagtgatcctcccatttcagcctctggtagtgctgggattacagacaggagccactatgcccagccatacatttgagattacgataagacatcaaagcagagattcaattaaagtcagagctagagatacaactttgggaagatggtaggggtcagaaaaaaattgggtgtcaccatgggactttctatgaccattaactgtggtcagaataagctgccctctgccccaggcactaacaatattaaagagagcggccgctgcgttggcttgggccccagagggaggacacgtggagcagtgccccgccctccatggacttggcccacagtgaagaataagtcttatttttgtaagcctctgtgaatcttagatgtcgctacaacggcagacactgcattactcttaactgttgcagaaacccctgcttattaaaacaagagggaagaggcaggtgaggaacatgatttcagttaggctgaggggtctgatgttgagaaaataaatgagttcacatgtagcattagtccagaggaaaaaaaaaacagtataaacaccatttccattccccaaatcagagcgctggaaaaagtcatctagcactgtttttccagctagtataacaggagtgtgacctttacctggactgacatcccagggtgtgtgtaatcaaatgtaaaaaattcattattgtgtcgactcttaattgattgtataacagagaatgcaggtcacacaggagccccagaaccgtttggctgggatttcctcatgcgctggttgttttgctgcgggtttactttctgctttcgtttttttgtctgctcacattaaaagtcttcattactcctgacgggcaggtggagacaggcagggaaggaaggtctgggttaggattctccaggcacgcccactggcagctaattgaaagccagttgcatcctctgaaagacctgaatggctgactgcctagaggggtgggattcccgcaacccacttccctattcagagcattcttcctgcacctgctcactgaagtctgaaatttgtttacaggagacacagacttttattcccagattagagcttaggcttccattgcaaaagtccagggagaaaggttgtgtctcctgtaaatgaggaggagcagcagtgcgtatggaggaaggaggtgcacaaatcaggccgaaacaggaaaacaactaagtttttacaacaggaggagtttaatgcagctaaatggttacagaaatcatgtaaacccagagattagtaagaaaagaaagacacgactttccctgggccagtgggatcaagggaggaggcagagtttgtgggaccgaggtcagccctctgaaactcagaccacagggacatcccgtgccagagccagagccacagaaaagaccagctgctgccagagaagctgcccgagacagggaggaaggggaagatacaccaggcttctcgcatcctgcagtctccccagtgcatctcatcgctgtccccaactggaggcaaaggcggaagcctgggaaaagcagcccatagcagtcagatcccttgctatgcagagcagagcaaaggaagggcaacatatgaatcagtgggaaaacagacacggaaagtgcagctcccaggacctggggtggctgcctaatgaaacacaattccttctgccgctgcacccctgccattccccatttttaggaatggctgctcccttctggcttccgctcctcagccctgatctagccatgagctctgaagaggtataaacgatcctattacagggccgggtgcggtggcactttgggaggccgaggtgggtgggtcacctaaggtaagaagttggagaccagtcttgccaacatggtgaaaccttgtctctactaaaaatacaaaaattagctggtcatggtggtgcgtgcctgtaatcccagtgacttgagaggctgtaacaggagaatcgcttgaacctgggaggcggaggttgcagtgagctgcgatcataccactgcactccaacctggagtgcaagactccgtctcaaaaataaaaataaaaataaaatcctattacagctgggtgtggtggctcatgcctataatcccagcactttggaggctgaggtgagagaattgcttgagcctagaagtttgagattggcctggcaacatagtgagacaccatctctatacacacacaaaaattagctgggtcatgttggcttgtgcctgtggtcccagctactttgggggctgaggtgggaggatcatctcagcctgggagtttgaggctgcagtgagccataattacaccactgaactccagcctgggtgacagtaagaccctgtctacaaaaaatggaaaaaaaaaaacaactgattctattgcatgatctcattcccagccctttgtgattggacaaaagatgggcacatgacctgggtgggccaatcagagtcttctctgggatttttcacactggggcgggtggagaagagtcctgtctgctctggttgtggagtggaaggacaggagtctgtacacccccatccttgacctgtgatgggaggcaaaagtgatttaagtagatggaacatagccaaagtccatgtgcagaggaaagtgaaaggaacgggagaaagacagagagggggactagagacccgatagcttcctgtgccctgactttgggaagggccaaggagagctccatcctgctccttcacagtgtggttgctggagcctatagatcactcttctggcttaaagtaggatatcattgttctgtccctgataactgcaacacagaaacactcagagcaagtgggagaaagaacacagggcctgacatcatactaaaactttcactaagaacaaacggggctgagagggcaaggaaggtcaggcagtccaattgcaaacaggcaccagcgagcaggtggctaggataccaatgtgcagagtcacagttttctcgagggtgtcagaggttcaaatcccagcttccttccaggcagggacggccaatgagaagtcagctgaagtcatgggacagaactttcgggaaagttctgtcaaagaggagaggggttgattgagaggacaggctcctttctctacacccatcactgccagactcacccccctctctcccttgcatcacacagattcatcggagaatcaggaacctgagggtccttgcccaagacaagcagagctgccaggaggagggagacaggatcctccatgccagtggagctgcatacagctctggctgctcacagctttcattacctgaggaaaaaatacgatgttttcattcttttgtgtgtttttctgttattttgttttatttaagccactaatttccacgtcttaactattcagggctgatagaattcctaattgacagaggacccacgtctgcctgctgtgttagtccgctcatgtggctatgaaggatgcctgaggctgggtgattgataaagaaaagaggtttaattggctcatgattccgcgggctgtacaagcagcacagcaccagcttctgcccagctcctggtgaggcctcaagaagcttctcctcatggcagaaggcagaggggagcaggcctcacatggtgtgagagggagcagagagagaggaggagtgtcaggctttctaacaaccagctctcccacaaactaatcaccaggaggatggcaccaagccatccatgagggatccacccccatgacccaacgcctcccaccaggcccaacctcccacactggggaccacatttcaacatgagatttggagggaacaaagcatcccaaccatggcaggtgactttttgtgagatgcctttttctcaaatgaaaatctttgctttcaggatctccataagagatccttctcctaggagaaggccacgtcttctttatgccaagggtgagcccagtgaggatgaaaaccccacttgaactgtggttcatgggccagggccacgagctagcaagggacacccagccggagaagcctggaggcctgcaggacccgcagaggggctcatgctggggaagtgatgtgcacgggatcctccagctctgagagacagaaagcatccagaggcactcctgcatgttcactgcagtcccaaatcagctcccttgcctctctaatcccaaacctggccaagggactatggggggttctttgactaatccactgtatcattagctccttcctttctgcgctggttaattttatgtgtctgcttgactgctgtggggtgccaagacatttggttttattaaacattattctgggtgtgtctatgaatgcattagtctgttttcacaccactgataaagacataccccacgctgagtaatttctaaagaaaaagaggtttaatggactcacagttccacgtggctggagaggcctcacaatcatggcagaaggcaaaaggcatgtcttacatggtggcagagaagaaagaatgagagccaagcgaaagtgaaaaccccttatcaaaccgtcagatctcatgagacttaatcactagcacgagaacagtatggggtaaactgccccaaaattcaattatctcccactgggtccctcccacaacatgtgggaattcggagagctacaattcaagatgagatttgggtggggacacagccaaaccatatcaatgagggtgtttctagatgagattcacatcaaaatggatagacaggataaagcagagttactcaatgcggcggcagtggtcagacgtggggggtgcggtgggggcagggctcatgcaatttgttaaaggcctaaatacaataaaaggctgagtgagaaaatattctttctctctgtctgactgtcttagagctgggatgtctgttgtatcctgcccttggacttgcatttggactgaaactgataccatctgctctcctagttctcaggcccttggactcacactagagctaaaccattggctctgttgggtctccagcttgatagctgtaggacttggacttctcagcctttataatctgagccaattccttatagtaaatctgagccaatagtaaacaggagctgattccctatagtaaatctctttgtatatccacgtgtctacacctatatctatatttatttctatgctactggttccattactctggagaagccaggctaatacactccccaagacaaaggcccagatcaaaggagaatgggggcagcactcccagcagagctcaggctgctgctttttaccaagacccctgccttcaaagaatctgatcttcaaatctcactgagggctgagggtgtcggaattattcacacaagggcatatctttccagtctcacaaggattcagacttcttatgtttattaagacaaaaatcctttaaaaataatagtctgttaagatttgcttccagtgctctgttccccagtgatggccctaaagacgtgcagtagagagagaggatcctacaggaagattcagggaaccaaagattgtcgctgaaagaccaggcccagctgggagcagttttaatgcttctgtttacaagaaggaacgaagttcagaaaagttgcttttctgtgcaaaaatgtcagtgactgtgagctcagatgcaggggagtgcaaagtggttaatcagtgtcacataaaaataacaaagacccctgggggcccttaactcaaattttgcaagtcatgcaggatgaatggagaattcttcctgggccttttttaaaaaatctgtttttagtagtggggaggggacagtggatgggcaggaagaagattaattatctgtgatgaacagattggcgaggccgggattcttccaacagaacaagcctcattcatggggtccctcggaggtcatcctcccagtgctctcagtgtgggggtgtggggttttccacctgcccacctctaggagctgaatgcttcatgcagaaagccaacactttagcccagggtcaccccatggccgaggacagagccccaggcatcagggctctacatgaagcagactgccccccacccccaccattttcccttagacatctatggtgttgaatgtcacagcatgagcctgtgctgctccagaagatcacatgccacctgggtgtctgccagtggacctgggcagcccaccctctgctagcaccttgcctgatcagtcttcctgagggctttctagaaggggtcacataggagccagacatgaagcaaggcttggtggcaaggcccattgtccagcagcccctgccttgtccctcagctccgaggtgtctgtaatattgtgggactgctccaggcatgggttcaaccttatggcacaaagcctataagcctcagggcactccacgcaggactaggtttcccagggaacaggctctgagatggagagaagcagtcacgatgcttactagaagatgctattgggatcaatatctgttggatgcaggggaaagaagcaggattaggcagagggagagggagatatccggctgggattgggaccaacaaagactgcagccgccttgcagggagctttggagcttcagtggccctgcagagatgctcctgatgggggaggggctgaaactttatagccttcattgaccagttattgggaagcctatgtcaccttgggtgtggcttttttttttctttttctgtaatttttatttatttatttatttaagagacagagtctcgctgtgtcacctgggctggagtgcagtgatgcgatcatagctcactgcagcctctacctcctgagctcaagtcatcctcctggctcagcttcctgagtagctgggactacagatgcacatcactacacctggataatttatttatcgatgtattttttagagacggggtcttgctatgttgcctaggctggtcttgaactcctgagctcaagcgatccttcttcctcaggctcccaaagtcctaggattacaagtgtgagccactgcacctggctgaggctgttttcttcagcaaaaatactatacaaagcacagctgagggccatcttctgctgtcctccaacagcttgggaataaatccttggctgttgaaaggggtctgggttgcatatacagtgtcccctcaccctccctaggccctagctccaggaattctgtgaatgctctcttgggctccagctctaggcccaggagtcctctgccacaatgaccatactctaagcttgagctaaaacacgtaagataaaccatactttaccaaaggtgggattgtgatgaaagaaggagaagaggacactagctgtgaaaggaaagctggatgttctaaaggcaaacattgtcctgcccaggggcctttctacttttcatttttattttactttatttttctcttatttttattttattttattttattttgggatggagtcttgcgctgtcgcccaggctaggggtgcagtggcacgatctcagctcactgcaacctctgcttcccgggttcaagcgattctcctgcctcagcctcctgagtagctgggactacaggcttgcaccaccacgcctggctaatttttgtatttttcatagagacggggttttgccatgttgaccaggctggtctcgaactcctgatctcaggtgatctgcctgcctcagcctcccaaaatgttaggattacaggcacgagccaccgcacccaaccttattttactttatttttaatgcacctaactaacagtgaaacagataaagtcttgagtccacgggtcagtctgggtgagacttgcccactctctcgacatttcaccttctttcatggcaacattctggtggacaaacctcacattagacatacgctaaggcttcaaccctgagcatagcccattctccaaaatcagccccacccactgaccccactgggtatgcgatcgcctgtgtgacctcctagcaatgagtgattggatgagaggcgagcgctggcctcacaggcatgtgagctgggttagtccatcccctctgctacaatccacaaggggctggtgaagactgggtcacttggcagtgggacccgcagcagaacagtaatgacctagaaaggacccagcacaggccaccgcttggggtacgagtgagcagaggagcatcccagcagagaaaaggaagcttaagttcacagccggctggcaaggcgggaaagctgggagcagcagctgctgaccagccagcttcctggacacaggtgcctggcactgagctctccaagaaacttgccctcatgggaggtggccagggtgggcaaagggtgaattctggctgacgggacttgaggaattgccaggggcttcagataatcatttcttctttggttaaaaaagaaagacagctgtgtcctttagtccttcctgcttgtagatacagaatattcagatctccagtagccattctgcaaccatgaggcgagatggagagaaccccaaggaatgaatttggcagactccgagcttctaaaatcccacaaacatcctgcttttatatttaccaccctaatagaaaagcgcagtcctgtcactgaagtcactgccatcccaggagccttgacttacaaccaaatacttcctcgcagaacaggagcaaggatggctaccagggacagcaataagcgcagtttcaggagccccatcctcgagtcggtttcatggggagaatgtcaaagaagggctggtgcagaagcatgttcagcagtttcctcaggctgccacggcagatacataccacaaaccagacacttggacaaatatattctcttatagccccagagaccaggagtccaaaatccacaggtgtcagctgggccatgctccctttgaaggttccaggggagaatccctggcctcttccagctcctgggggccccaggcattccttggcctgtggaaacatcacttgagtctgggcctctgtcttcacatggccttctcgtgtatgtgtgtgtgtttgtgtgtgtgtgtgtgtgtgtgtgtgtgtgtcctcttcttagaaggacaccagccattggattttgggcccaccctaatccagtatgacctcatcttaattaacgtgcagaccctatttctaagtaaagtcacattctgaggttcgtggtggatatgaattttgggggatactattcaactctccaaacatggatgactatttccaggtcagtgtgaggcccactgctggtattttctaaatcactcagagaagaaagttttcagagaaccgaggtcctgccaggagccagtgaggtctgaattactgttgtttagaaaaccagaaaacctgctctgaccagagtgctctgagtcctggagaaacgcaggtgcctgcagcattgagcgcaacgcaggtgtgttttcaggactaatgaatacctgcaaatgccaccaagatcttggagacataatttctgctcagtcacacaagaaaaccagactgcaaaaggaacagggcctcgaggcattaagggagagttaatggtaccaggaggtctgcaagggtcgctgttgaatatcattctcaacgagctggtgggaattcacatgtctcaggcaccgcacagaacagccatgggcttgcctctcctctttccgagcagtgaagaagcagaggggccttcagggagacagagctgcctggggcccattgacattaaatagaagaaaatttgcatcttggccgaaagaaaaccaccatgccttaggctgtgaataaaagcacccagtctgcacccacacaatttagcagcaggttggagacccaaacgcctagaattccttggactactatgcaagtggccctggccagaagacattgaagaatgagagttggctcagggcttcagagggtgtcaacccatcatgaccatgctctttttacaaaaggaagacccaagaccagcagagaggaggcggtaggctgcggtcattgagtcggcccacagcagaaccaagtggagctgggaccatgtctctgcactcgggccacaagtttccctttgtgcattttttttttttttgagacagagtcttgctctgtcctctaaactgaagtgcagtggtgctcaccgtagcctcggacttttgggatcaagcaatcttcccaaggagctggaagtacaggcacatgccaccttacacggctgatatgtttattttctgtaaagacggggtcttgctatgttgcccaagctggtctggaactcctggcatcaaatgatcctcccggctcagcctctcaaaatgctgtgattacagacatgagccaccgcacccagcctgtttcccttctgaaggaaagtgagacatatccagccctgtaatattcctagactgggtaacagtcctcacagtcctctttctgtcctgtagagattttccccaaaataatgcccaggagcttcctgactatctgccaactgtcactcttgtcatttgaggcccggggattttggggacgtttctgaggttcactgtcactttcccatggcctgcacagccaaaatgcaaacatagccaaagccagaagccaaggatatagtgacaggacgttctcaccagggacgtacctgagcaaatgacgtccatcagcccagctcacagagacgcctgaggctcaattttgtccggagcccagagaaaggctgggtcttgaggggcagtgcctgttgggtgggagcgcctcatccagctttctcatttcaggtgggtaattctgagcccaagaggaatctgaaattcaagacaaagcttccaagagcaatgcactgtcttcattgtcttcttgactcttgatgggattatcttatttatttttgatgggattcactgcccagagtgttagaaatagaaaatcaaagacagaggtgtgaatcagagccgtgctgtggttttcttactcgcctgtgatcaggtgtgtgcacctagatcactaaatggaactgtgtcccgccccaccgctgctggctcccagccagaagcctacatatccccagggcaggacagaggtggtacagctgggggcaactggctagattccttacatataccctcactgagtatcaacctcatagggaaactgtgagactgagtttccttcttttaaagtaagggaacaatgagatcatacttgctcataattaactcaacatttgttaattaagaagccagacctaagctacagggtgggaagagactgggaagtgagaaaccaactggcccttgactttacagagctttgttttttttcaacttttattttagattcaaggggtatatgtgcaggtttgttacatgagtaaattgggtgtcaccgaggtttggggtacaaatgatcccatcacccaggtattaagcatagtactcaataggtagtttttcaatcctcaccctcctcccctccacaccctcaagtaggccctggtgtctgatgctgccatctctgtgtccacatgcgctcactgtgtaactcccacttataagagaaaacatgtggtcttgggttttctgtttctgtattaatttgctgaggataatgacctccagctgcatccatgtgtctggaaaggacatgatttcatgcttttatatggttgtgtagtattccatggtgatatgtaccatattttcttcatccagctcactgctgattggcacctgggttgattccatgtctttgctattgtgaatagtgctatgatgaagaaactagtgcatgtgtctttagggtggaaggatttgttttcttttcaattatatacctagtaataggattgctgggaagaatggcagtgccaagttccttgagaaatctccaaacagctcttcaccatggctgaactaatttacattcccaccagcagtatataagcattcccttttctccatagcctcgccagcatctgttatttttttactttgtttacagagcttttgcataagagagagataggatacaatcacaatagcaaatgggaaattgcaactgtggtcagggccatgacagagaggaagattagcaacttcttctacaagaggcccatgtgtgatgtgacccagtcaaggaagtcaaagtgaccttcaagttgaagcaggaatggtgagttagagattacttggcaaggaaggaagggaaggacactccaagcaaaggaacagcaaggctcgggaggatgcggtaagtgcaaagatggatgcagggcagtggggctggggggcaggggtcggttggtgggcgagatggccaaggtgagcggctctgtccatgcaggcagcaatggaaagcgatggaaacctcatgagtagatattgatccgattggctcatgcttcgaaataaataaagcaaaagaaatgttgggggtgagggcagcacacagggcctgcaaggaggctctgttgatggtccaggtgacagagaacttgaaatgcaggatcacacaggtagtaggagccaaagcctggactcaagctacagcctaggaccacttatccactgctgatgggaacgcacatcggctcagccagcagttcacatatttcttaaagaactaaaaatcaaactaccatctgacccagcaatctcatgactggtatagacctgaaggaatataaatcatcctaccacaaaagacacctgcactcatgtgtttaccacagcaccattcacaacagcaaaggcatggaatcaacccatgtgcctatcaatggtgagctggataaagaaattgtggtacatacacatcacggaatactatgcagccataaaaaaagaacaaaatcatgtcctttgcagaaacatggatgcagctggaggccattatcctaagaggattaacacagaaatagaaaaacaaacactgcatgttctcactgacaagtgggagctgaacattgaacacacatggacacaaagatggaaacaacagacactggggacacccagaggagagagagagagagagggagagggcaggggctggaaaatctacctattgggtactatgctcactaactgggtgatgggatcaatcgtaccccaaacctcagcatcacacaatacactcatgtaacaaatgtacacaggtacccaccaaagttaaaataaaagttgaaataaaatttaaattaaaaacaaagccaaagctagacccactgcactcagcctcgtaggtgagtgtcttaaccacatcaggaactccttgaggcttgctttggaaagaatctccaggtggggcagctcatgcctgtaatcccagcacttcaggaggctgaggcaggcggatcatttgaggtcaggagtttgcgaccaccctggccaacatggtgaaaggctgtctctactaaaaataaaaaaattagccaggtgtggtggtgcacgcctgtaattccagctactcgggaggctgaggcgggagaatcacttgaacccaggaggtggaggttgcaatgagctgagatcgcaccactgcactccagcctgggtgacggagtgagactctgtttcaaaaaaacaagaagaaagaaagaaaaaaaaggaaaacaaatctccagcactgtgccctggaagggctgtccaaagaatgacgtgtttgtgcatctccagggtagatctctgaaagaaagcatccaatatccagggtttgacatttcccaacagatagcctcaagctcccagtaagggcctccaggacaggccctctggggcgtcggtgctcccctgctctcctgggaagatgatgctgaagttcagcctcaatagcccactgctccttcagtcctgcgaggtgaagacacaacttccacataccacattgtctagagaaacaactaaattactagttttaagcaaaactggaaatcaacacctatccctaggtttctggagctaaatgggctcagagatgtggatgacagagtacaagtcaaaactccatgctgtaaaatactgcacgctttttataaatgttaattggttagagtatcataatttttacacacatgtaaataaggttaatgaattttattccacacagatgatttaaactataaaacaatcaaattacttttcaggtaatactttgggcccaaatgaaataaaatttcaagtcattataactttagaaaaagaaactaatttgaatatgtgatttagatccattaaaagtcttctcaactttaaatagtgataatagaaatcagaaaagctcgagagtggttaagattaattaagagtgaatgcatttgggaaaaggaaattatgaggctatgattttagaatgcaaatgaggtcaagaagtttaaactaatgtgcatctatataaacacagcctcaataaaggaaaaatatttcattacaagggtttataagtactgtattctctacttcttgttacatgagtagcaacaaattgataaacagcaacctgttgtcagctaattacagcacccttgtggctgccaatagttaagctggtacgaaattagaaatcttgattttcaaagttctatgcagcctggtttctttccttatgatgtaggcagtgctggtgacccactcaatcctttgaatccttttgtagtagcccatcttctatttcgtgggcttggttacaaaaggcccccacctgcaagggtcttcaggcgctttctcttgggctaccagagccacctcctccaagcagacagccaggaacgcctggaagctatgctccccacctccactcctcatcctggttaatcactggtatgagcttgcaaagcccaccttccttgccttgaggtggcagaaactcgggtatatttagactccagagcacaggatcaggctatgtgtaggaccttgccctgaaattgcaacactgcagctggacctgtgttagggtccctcgaagtagaccctgagaggaggatttttatgaaactcttttacagagaacactttctgatgaaatgtgtgcagaagtggggaaagcaaggaggagcagtgaagaggcaggcaaagatgtagtttcctctgaagtctggcctcagcctgatcacagagggtgctctgggaagggaggggagacagtaccgtccagttgtcccacttgagggtacggggtgctctttcatattcccatatcagttagcccttggctatgggccaatcctgggaaatataaactttgttaacccaaggtgattctctagagaatggtgagtcaccagcagcccagactcagcaaccgagggatctgctcccagctcagtgaagacaagctgggcgctcacggcctctgctcagtgttccccattcccgatcctgctcctctctagcctgccctttctctttcctctctccttgaaaactcacttgtacctgaatcccaggcacagcttcagaaaaacccaacctaggacaccctcctgctctaaggatcaagaactgcactgcgtttgatgccacagctttccttaacctgaaagctgctgttattttttttccttttttgagtcagggcctcagcccacgctggagtacagtggggcagtcacagctcactgcagtctcaacctcctgggctcaaagtatcctcccatctcagcttcttgagaagctgggaccacaggtgcacccccacacccaactaatatttatatctgtagagatggggtctcactatgttgcccaggctggtcttgaactcctggcctctagtgattctcctgccctggcctcccagctttctgagtccatgtgagggaacagcatttgtaggacggggctcctgcagctccttccagcctaatatccaggttccattcttctagtaacagtgacctgatttttctctgtggaaccagacttctgtcaatctaaaaagtttgtgagcatacagacacacacacacacacacacacacacacacacacacacacacacacacacactcttcagaagggcatttggcctaggcctggccaataagaagtgaggggttggctctgggataggcgtgtgatccaagctgagcctctgccctgggaatgctgctggaatccttgaggaggtggtgctcgcacatctcaagaggcagccgagcgccacctggccacaaacaggtagactctgcccaaggttgaggcaatcacagaagaaagcaaagccgagtagcagagtgtgaaggtgcatggcagcctcatgggagcctggagcagtctctagccctctgagttgtgggagccaattcagtcccttcagctgtgggagctgctcaggccacctggagatgagtttcagtcactcgcaaccaggtggccctcccctgactaagatccctgagaaggatctggtgaaaacccgctcttaggaaattgtctgttcctgagatgtgtgctgtagcattagaagtatgtgctagcatacttctggagtcctggcaactcacatgacctggatcaaggtctttttttcttggcctcagttctcctgtcatattacgggagtgtttggactgtgtatatcctaggagtcaagtcctcagtccaggactctatcctttatgagcacacgccaggtgctgggctctcccgtccaaccctccaggcccccaacactgtgagctctgaggctgagctttcttcacaagggcaaaatcctccccatacttctggccccacctccagggacctgtcttgggagagatttggggcccagcctagatgaacagatccaagagctggggccactccttggcagtcctctgtctgctggagtcacccttgtgctttttgtgggagcacgactctcattcatcatttcaccctccacttcatgaagccagcccaggggctctcccagggccgcgtagccccgtgcatggaaacagtcctggcagggaggggctgggtttgaattctggcttctgtacagagatgtgcaatcgatttcttcaacttttcaagcctcgatttcctcatctactcagtgagaataatgaacattagatgtgagtgtcttaggttgggttgggttgaactttctcagggttacataacttactgtagcggatgctgtcagactctgcccatagttccttgggtctctttaccagacccctgtcctcgcactcaccccgagccagaaggggtgtgtcttagttggaaggttgaccttaaacttccggaatctactttgtgtgcctttaaggaagagccagaaatacctggacatgtgcaccccctcaaccccaccccagccaacacttacccaatgccagacggtgtctgcatatacaggggtataaacacaccaggcctcttgccctgggtgtgggcagccctgagatccaatgcagtctccaaagtcatccactgtgagacttggcttcataccacatccttgctgggtctccctttcttcccagccccactttctacttccctcctggatattcctgcggacagctcccactagggaatcctcacaagcactgtcttctctggaatggggaaacagtcttaggtgctcccatctgatgtgtaatggagtgccctacccatcacacctgttcaagcagtggctgctgccatggctggtacagtccagtgctggcatgcatacacacagtgcacaaatccctggggggggtagacacacacgcatgccaacacacgcacacacacacacagtgttcattcctggtggagacaagatggcgagcacacctgagatgcagtgtagtgatcctcctctaagtcatgtctgagagccccatggaaacaacacgaccgtgaagctaatgcaagaaccaaatccctctcactttaagaaacctatcctcagccaagtgcggtggctcacgcctgtaatcccaacactttgggaggccggggcaggtggatcagaaggtcaggagttcaagaccaacctggtcaacatggtgaaaccccatctctactaaaaaatacaaaaattagccaggtatgttggcaagagcctgtcatcccagctactcgggaggctgaggcaggataattgcttgaacccgggaggtggaggttgcagtgagccaggatggcaccactgcactccagcctgggcagcagagcaagaccctgtctgaaaaaaaaagaaaagaagagaaacctatcctcaggcatgtaatgaaatggcctagggcagttcttcacagcacctggtagcagcagcccctccatgtgtctatgagatgcttaatcagacagcacagtcatctgtcacatttctatttccctttattttccagaaccctattagaaaggtcaggcaggatagaaacagggttaaggagagccatgaggaggcctggaggatattcagtggagacaaggacctcccaaggcttgaaagcatcaagaggccaccaggcaggggtcagcaggtgctggttgctttgagcaccccaagccccagcctggatatgtgtgtcaggggctggtggggaagctgccgtgcaggcgggactcccatgggaaggcacctgggggagtcactctgcctctcaacccctggtcaaatgaaggctggagtgcagagatccactgtgtctaggacacctgcttcagagggacactaacgccaaaggaaacagttgagagagagtgaaatgggagggaggatttacaatgtgatttaagcgcctggattcagtcacacctgaaacccagaacttcttgatttctaggccagttcgttctctttgtagcttcagccagttgaagcaagaccttgtcactttcaacagtgattgtgggtgaatgatatagtgattggaggcccagagctttgtgtgggcacgagtggagccctaggcccccgatcaccacacctagggcttatgcttttgtgccttagcccatacctggtacctataacttgagatacctgaagatatgccacttcctccagacccacagatacccttcaatatgctgccccaaatctcacccccaactgaggagtacatcctgacagtaaacattctttttcttttctttttctctctttccttctttctttctttcttttttttttttttttttttgagacagagtcttgctctttttgcccaggttggagtgcaatggcatgatctcggctcaatgcaacctccgcctcctgggttcaagtgattctcctgcctcagcctcctgagtagctgggattacaggcacgtgccaccacatctggctaattttttatttttagtagaaacaaggtttcaccatgttggccaggctggttttgaacctgacagtaaacattctaacccaagctcctgagtcctgcccttagcgcacatttgcaatgggagcaggaggcgaattagattagaccaggctgagctgggagagtaaataactctaaaatgccatggcttcaaccacattcatttctcatccctgcaaagtccactgtgaatctaggtgactctctggccatcctcctccatgtagtgactcagtgatccaggctgccctcatctggtgaccccaccatctcaacgccaggcctccgcagttgctgcagcaggagaaacactcgggtgggtccctcacagcactcttctaagcttcagctcaggccctgcccacatcgattagccaaaagtcatcccgagaccctgcccaactgggaaggggatttagaagtgtgcctttcttgagagaaactagctgtgggcagccagggtgatgtccccccacagcaggtacaggaatgcagtgtgatgctgaagggccagcctggctgttgagagggtcagcaagaatgggagactggagaagggaggggcacactcttcactcctgctcagagcccgtcactgcacaggctagggactggtgcagccacggctgtgagtttggggtttgctgcttggattttaaaactgctccaaccagctgccatgtttgttagagattgccattgcatgtatgagaaactcaagcagctcagcctcatagagtttgtttgtttgttttctagtgggccaggaaatctagggaggcagctaggggctgacatggcgactctgagatgctacccagaccccaggcttctgggctgtccagcccaccgtctctagcttgtgcttttgttctcaaggccacctcatcattacaggtgttccctggccactccacctcagacaagaagacagaaggacacagaaggacctagaagggaggaatgctacctgggtcgggaagtaaaactttctcaggtgtccccagcaggcctctgcccatgttccgttggccagggcactgggggcctgggaagcaccgtgtttaggtgagcacgtttctgccttgatgaatttgcaattctattatcaagcaagacaggagaatcgatattaggtgggtgaatgaacaaactattaaataacaggcagcttcctacaaaacattgagtttctattggctcttttgaagattgaattcttagcatacaaggcctgcatttcttaatggcaaagtctcaggggatgagtttggacttctccccttaggaggttatgcccccagcattttcttgtctgttggtgtctacttatattacactcagtccaccttacccagggctggcttcacacagtgtgacctgtgtgatatcatagtgttccacgcttggtttgcctctgtggctcctggggaaccagaaaacacatggacatgtaagcagacagggagggtcccccgggattacaggaatttaatcaacagagccatcagcctggtgcacagcttcctgccctgcagcctgcttctcttaatccctgtgagaaatgtggtcacctacttggttaaaaccagctcctgacagagctgggcaacgtataaatgaacccaagagctttcctcatgactactccaggaggagccacagtttcatcaccatgacacgcgacccatttgctggcatgaactcactgcatctgcaccaggggacaccccccctccatgcaatggcgtgccctctcccctctccatcatcccacaagaccctgctgtccctttccctcagggacacactgcttggggaatacgcccatgtcctccttacttgtgccaagtaataaaactcctgttgatcaacacctgccttctcatggagagtcatttgttacttgccaggtaaactcccgtttcatcagggaatagactcaggacctgagagacctggattcagaatcccagcttagagtcattggacaagttacttagaatcctctattggccgggcatggtggctcacacctataatcccagctctttgggaggctgaggtgggattactcatcccacctcaggaggattgcttgaagccaggagtttaagatcagcctgggcaacatagtaagaccctgtctctacaaaataaaaaataataataaaaggctgagtacattggctcacacctgtaatcccagcactttgggagactgaggtgggccgactacctgaggtcaggagctcgagaccagcctggccaacatgctgaaaccccgtgtctactgaaaatacaaaaaattagccgagcatggtgatgtgtgcctgtaatcccaggtactcaggaggctgaagcaggagaatcacttgaacccaggaggcggaggccgcagtgagccaagactgcaccactgcactccagcctgggtgacagagtaagactccatctcaaaaacaacaacaacgatgataataattaatacagaatcctctaatctcagttttctcatctgtttaaagaaataaaaccacttcttcctcagggggctatggtgatcctagacagaaagggcccagcccagctatgtgtacctggagtttccacgacagtcctgtccattattaatgcaatttccatttctgttgtaaagactgcttccaccacacctgcctaatgacaaagcctcaccttcaaagctggggcataaggatgtctgtggctgctagatctggagtaggggctctcagccccctactctcatttgaacaaggcagcaaccatgctcacgggatgccaaggagagagacaagtgaggctggtggcagctggccgagagggtccccgtcctacctggccaggccaagaaagctgttgatgcatcccaagacctagcaagacttactttctcagtcaccttgaaaggaaggacaagcctccaagtcggctccttgggagtggagagaagaagtttcctccactccactgctgagagttacaaaaggagccattagcacttgccaagcaaggccaccttccatctgagggagaaagtgcaaaagacagtttaaaagcctcattaacacaaggcaacaagtcacaggtgaaaattgagcctctgaggccctgctgattgcacgggggggaaggcatttgcatctcttctcaccacagaggggtggcagccaattacctccaggattagaaaaaagttgcaaacctgagtctatcttcactgacgggcttgaattccctgccatgtgcccctcgctaaagcctccgctttgtgtatgagaaaaaaagcctctaagacctgtgggaaaacataaaatctggaagcaagttcacccgtggctgaccagaagcagaaatgttgcttcctttgtgcaagcccttcctggctgggccagaacatcagctaatgcagcctggcacgtggtctggcaggataggccctgccaattagaaattcaaacacaatcagtgtaatgcctatgcttttgctccctacaggccgtgcaggaaacagaagccctgcgtgtctgtgtcccctaaataaatgactctggttcattcactgcctcctacccactcccttgccagctgttatgtgtgggttgtggagaaaccccgcagtgccctgcaggggcttcttcctgcccttggggtctatgggaatgctggttgcctacatagtgcacactcaaatgtcttcagcgcccaaggctgtcactttctcagctccctgcctactcaggtctacgaagtcaactgcaaggttgtggtccattctttccacaccaaccctggccacgggaccttagccctttcagaactcagggtgctgaaatgtctgagaagtttccccaaggaacgtcaccgagctgtcccctccccaacaacctagggcagcacaggtctccatccattgcccctgaagcccccaatgtctctttctccctcccaccctcagggaggctcactgacccccgcttaattatgccgtgtcctccgttgaagacctcctcaatggggaagtgagtactggcaggggaagaccacagtggggaattttaggtgtgaagtgttctatgaatacatcttcatctgggcggcggccacacagacacaggtgggcataaacatgaggtacaatggctggacactcagtattcatgcacagacatgtgttactgtgtgtgtgtgatacttcagttttaaaattatgacaccccaccccaaaaaaattaattatcttagaccaagcatggcaaacagccaacatacagtccctcagagtggcaatttcctaagttcaaccaagtatttttggccgggtctgaactatgtgtgcttttaacaaaaatttgtttccaacctttaaaatggaagattttacataaaaattttgaatttctggctcccactaaaagcctaaggggcacttgatctccagttgtagccatttggatttgcaagctctttttcagtcattaaaatacaaaatacaaagaccccaaccagctgctggaaaggtattggggctactttccaggactgcactggacaggggtgggatggggaggagctgggcatagggaatgctgttgtaaatgcagttatttttttaacctttttttctgctatatcaagcaaaaacattaaagtaaaaaatacatataatgtgtatacatatatatacatgcatacgtacctatctatctatacatacatattttcccctttctttcacttaaatcttcactcactagttcctgtttgattatttttttctccctctcatccattgctattaatttctggcagcaatttataaatgccccactactctaagaaccattgaaatcacagttggaaacctcgataatttcaccaaggcagaagcaattaaatgcaaacattggcaaaaatttttaacgctgcagaaaatcacgaaaatgccaaggtaagctcattgctgctgcagatttaattcctactctccttaaaagccagaaatcacctctctccccagcaggacctgaacaagccttaaactagggccatgtgaggccacatgaggatgattcttccccctcccaaacccagcgtggcagagaagcaggcagccccgagggcatgagagatggaagcgtccccctgatttttctcatcccattcaagttcaggactgaaatggacagaacaatagttaaccccacagcctgcagcctctaccactgataaccaggaaaacacagctaccttatacacttctgctctgcgcttttcaaggtcattttctcactagggcactcactgaaagtctagaagttagaaaaatgggaaggttgagggacccctttttcatacacatagaaagacagagctcaagtttaatcagcaatttgccattcaaagtaggataagagccagggtctccaggcttctaatctaaccccactgcttctttcttctagacctacgactcgttccagcaccgtgggggctgacacccatctcactgctggataaaagagaatgagatcctctctccatcctacgttggatttgcttgctcacacaaactgacccttagggacagaattgttcaactacaattagatttagttaactaatcctggaagcgaagcttagcatatcagacagggttctggcaggagactcactgccctcagaaagttcaccctcacaggctgcaacgcagtgactgtctacagcgatggggatgtggcaggggctaaggaagccaacaagagattgtcaccttcttagaggagaaagccaagatggggagatattaacccctatgcgtgaaaacatgaggggaggaaggaatgtttagcccagtgagactcagaggcacgagtcagcacctattacagacgtggtgcagaaacatggaggacatggagaagaaatatcctgaccttgttccactttcaccctccaattccctgacagtggttcccattgactgagcccagctcgcagtcacaggcagggagcaggggtcaatctcctggtgcacaggcaggctgaggagggaatgaatgtaggaaagggctggggagagaaaataagtagcatgccttacttaagagcctcaggatctttatctgtaaaattggatgataacatctacttaatagtgcagttccgagaataaaaactaagatatctaaggcatgcagcactaaaaagtattgaaaattgtaaacttactctcctcatcatcatgagctatgcttcccttaaacaatgctgttctgttcccaatatgaggtatcccgcagattagaatggctgcataattgcttatcctccaggcctcattccccacaaaaggacggcatactttctggagtatagcattcctgaaaagggcccctctagaccatgtttgattagtttcagtgatggtggactaactgcatccccatctcttctgccaccaaatcactcaaaactcagaaaactatttctgtattatcaggacaaagcactccctatgcatattctccaaggcttctgcactcggaggtcaccaggaagagatctgctctgctctctcattcactggagccctacagatctgggaaagctttgggtttttttttgttttgttttgttttgttttgtttgtttgttcgagagggagtctcgctctgttgcccaggctggagtgcaatggtgcaatcttgggtgactgcaacctccgcctcccaggttcaagcgattttcctgcctcagcctcccatgtagctgggattacaggcacccaccaccacgcccaactaatttttgtatttttggtaaagacggggtttcaccatgttggccaggctggtcgcgaactccggacctcagctgatctgcctgtcttggcctcccaaagtgttgggattacaagtgtgagccaccaggcccatccagaaagttcttaagttagatctattcttcacaaaagagaggaaagattggggttgggggtgggaacccagctctttatgccaattaattaacgcacattgaatggacagatttctttttctttttctttctttcttttttttttttgagatagagtcttgctctgtcacctgggctggagtgcagtggtgcaatcccggctcactgctgcctccacctcccgggttcaagcgattgtcctgcctcagcctcccaagtagctgtgattacaggcacctgccaccatgcccagctaatttttgaattttttagtagagatggggtttcaccatgttggtcaggctggacagatttctaaaagacacaactaccaaactactaccactactaaagcccattttagcaagaaatagataacctgagattaaatccatagttaaaaacctttctacaagagaaatactgcaggccctgatagctccactgcttcaatggtgaattctacctaatttttgagaagaaaagtgtatcaattctacaaaattatttcagaagatagaagtgaaaggaatactttctaactaattttatgcggccagaatttccctgatactagaagtagaaaagaatatgtcaggaaaataaaactacagattaatatctctcataagcatgtatacgaatatcattagcatgattttagaaactgaatctagcaatatattttaaaagacaataaaatatgactgtgatttgtgatatagtaagaatatatacgtatgtatatacttggtatattagacacagcaaaagacagcattgttaaattaaggcaaaaatacaaaaataataatcgaaacagaggcacagagaaaaataattgaagggaaataaaagccaaataaagcatctgtaactagccacaaatagcaaatgatataaaatacttgcaagtagaattccagaaggaaataaaagatagaatggggaagaaagggtgtttgaagaactaatggctaaatttttgcaaatctagccacttacctcaaccaagagatgcaagcagctcagcaaaacccaagaaaagtaaaagggaagagaatcacacctaggctcatcatttttaaactccttacaaccaaatatattcacacaaaagtagtcacattagatatatggggaaaatgataaaaatggtggctcacttatcagaaataatggaagtcagaagatgtctttaaattctgaaggaaaaaataaactctttcaaccaaaaattctatgctcagcaaaaatgtccttcaaaaataaacaaaatatgtaattacagttgcataacagctgagaaaatcccttgccaataaacctgaactgtaagaaatgtaaaggaaattcttcaggctgaagggaaatgatacccgatggaaactgttctacaggaaggaatgactgtgccagagaaggtgaggaagtgcaccttgctgtgaggagaaatctgtgctgtgctctgtgtgtgcatcatggcttagcaggacagggcagccacaggcctccctgcagtggacttgggacttcttcaaggcctgaggactggctctcagctgggtgctgggatcttcctggagaagctcttcaaggtgtaatggcctcccccaaaagcagagtccaggttctgacaactctgggtttctttgggagatgaaggcatgcgcagaaaatgttgtcaccattacctagttttgaagaactttatgctctttttttcaaaaaaaaaaaaaaaacagctataaagaataataatacataatttgctttcaacttaccaaattaatttaaagtgacgtgatggcctagcaccatcctcaagagataccaacctttacacagagccatcataaatagcaaatatagaggctgttagtaaaaaaaactcaatgaggccaactctatggctcaccgtgaaataaatttcacagaaatagaactttaaaaatagaaaactaaacaagcaaaactggatgaactgattgctgatattcaagaagccaaagtcattggaccctaaatcataatccatcaaacatcgatggtttttccaaatagatcatgtcacagagtctttcccacatggtccttcaccagaggataccatttgtcttcaagaaaatacttttacacctctctactcatattctcacttttgctcccagactttgtcccccaaactcttcctataattctacatttattttgctggagaatttcatggccaaggtctctatgattttctgcacttccagaaagcattcatggacaccccccacccccacttgacaaaggcatttttctggcctgccacatctttcattgataacaaggacaacatcctccaagaatttatcaccattttcttttcccatgtgctagactttgcccctctcccctgccatcataagaataatactgcattatcttcagggttgaatttcagtgttcaaatgacctactagtgaacatctagaaaagtagaaaaaacaattgacttaaaaaaatattttgaattatctctcattttaattcaagaaactactattacttaagtgattatacttttgcccagaggaagctttatagaattattattcttagcataaaggtttgtaagtaaaattatttagaatattttttgagagcatgctcttatttcagatgccaggttcagcatgcagagcttggaattcatcaccccatcctaacaagcaaaaagctgaacccacggaaaaatccctcttctcagatctttcggaaaagtgaggtcacagggcaaacactgctctcaaaattggagagacagacaggtgaatacagcaactcacaacttatcagagcagaaacccatcagcaaacacctctgagggaccccaagccaggttaggaaaacctcaaatgtcattgacaaattgctggaggctccacatggacaagttaaaaactccagaaggacctggtcatggaggggttgcacgggacacgcttctgtgagttttaccttcaggagctcaaccaggttctcacagtgaatatcagagaaaaatctcctagggcttctggcaggggaaaggaaaaggaaccattttgaaatctttctgagtattctgttattaataaggcctcacaagaaactatttcatcagagcctaaaccattggagttttatcagagccaacctgggaaaaggaacatgcccaattccagcccaccttagcttttcacacgagagaaaggaaatacccagctttagccacctctagccttcaacatggaaacagggaatacccgatgccagtccactctgcccacgctgtctcacctgatgggcaggtacaaaactgagaagcactggtgaagttcacagtccaggggcacgagctcactaaaagactgagagctaattctaggactatagaaggcacccccatatcttatcaccacattactaaaggcctggtaacctcagtgtctggctattacatgcacatgaaaaatttataaagcaaactaaaaggcaaaaaaacaattgaaagagacagcaaacatcgtaagaagactcagatgtagcagagatgctggggtactatcagaccaggaatttaaaacgattattactaacgcactgagggctctatctaatggatgaagtagacagcacacaagaacagaagggtgatgtaagcagagaggtggaaactctaagaaaacatttttttaatgccagagatcgataacacagttacagaaatgaagaatgtctttgctgggctcattagtagactggacacagctgaggaaagaatctttgagcttgaggatatgtcagtagaaattttcaaaatgaaaaagcaagggaaaagaaatctacccaaaacagaacggaatatccaagaaccatggggcagctaagaaaggtgtaacctacatgtaatgggaataccagaagaagaaagagtgaaagaagtgtttgaagcaatatttgctgagaatttcccccaaattaatgttacaaaaaacaaaactacacatccagggagctcagagaacacccagcagggtaaattaaaaaaaaataaaaaaaaaatatatataagcacatcatagtccaactgcaaaaaatcaaagatgcagaaaaatattaaaagaagccggggtgagtggggaacaccttagctacagaggagcgaagataacagttacatcagacttcccagaagccaatctgaagagaccatataccgtatgatcccagctctatgacattctgggcaaggcaagttatgcagacagtaaaacgatcagtggttactaaggattacagggaagcacatgcagggcacaggggattttagggcagcaaaactactctgtgtgactctacagtagtggatccatgtcattacgcatttgttcaaacccacagaatgcacaacaccaagagggccccctcatttagtttatggacctgggtgacagcaaacggtccatgtagtttcagcaattatgacatatgtcccattctggtgcaggatgttgatagttggggaggctgtgcctctgtcagggcgtaagtatatgagaaacctctgtactctctgctcaatgttgctgtgaacctaaaactgccctaaaaattaaaatctattcaaaaatacatgttctaggccagatgcagtggctcacgcctgtaatcccagcactttgggaggccaaggtgagcggatcacttgaggtcaggagtttgagaccagcctggccaacatggttaaaccccgtctctactaaaaatacaaaaattagctgggcgtggtggtgtgtgcctgtagtcccagctactcgggaggctgagggaaaagaattgcttgaacctaggaggcggaggttgcagtgagccgagattgggccactgcactccagtctggcaacagagggagactccatctcaaacaaaacaaaacaaaacaaaaacatgttctaaagaccacaatgaaataccataccactacaattccactagaatgaccaaaatgaaatcaatgttagagagtctgtggaataattacatactcctataccgctgttgagtgtttagtacaatacttagaaaactgttcagtaatttcttaagatgctaagcatacatctaccctatgacccagcaaatatacttccatgtatttatccaagagaaatgaaaatatgtgctcacacaaagccttttataagaatgttcacagcagcttgattcacaataatccaatgtttgaaaactttccaaagtccaccaacaagtgcataaactgtgataaattcacacaatggaaatcacttcagccatgacaaggaatgaactacttatcatacaacatgaattctcaaagtgcactcagcgaatgaagccagacacaaaaaagtgtatgcaatgtgattccatttatatgaagttacagtgtacgccaaatggtggagggatagattgggaaggtgtggaaggacatattctgggatatatgtaaatgtcctgtcttgctatgcatgtgccaaaattgagtagacggtacacttgacttgtgtgtaaattaggcctcaatttcaaagggcatgttctctggtaattacctctttccactagagtccagggcacaaggaatatgaaagcagggttttgatgcaaacagacaggctttagggcaataatcttaagaatactgagctcacaacacagctcaacactcagagcaaagggagggtagcctgtgtcctgcctgtgtagccacctcttctcctgctatacctgactcttcccagaccccaccagagctgtagcaaagaccagggagtggccaggcatggtgggtcacgcctataatcccagcaggagtaaagcttgagtctaggagtttaagaccagcctagacaacacagcaagaccccatctctaaaaatcatttttttaattagctgggtgtggtggcgtgcacctatagtcccagctacttgggaggctgaggcaggaggattgcttgagcctaggattttggaggctgcagtgagctatgatggcaccactgtactgtactccagcctgggtgacagagtgagactctgtctcaaaaaagaaataaattaaaaaaaaaaagaactgttgaaggcaaagtttttccacaatattttgccattgtagacagtgaagcatgcttctccagtcttactctgaggctctgagttcatcagaatgattgaaagttctgctttcaaaatcaatgggaaaagtgtcatctttgatgacataagacaatgatgtagagggaatatggaattatccatcttctcactgctgggggaagccgcatgcaccacagaagtggcatgaggctttcatgatagctgctcacctcctaaagctcatccaagtgacatgctgcttgacagcctgttgcatattcaagccagaggttgcaaccaatgggggtttgctgatatgaatggcttggcttgctgagttgccaacactgaaaaattagagttttatgtgaaagtctgggtttccatcttctctagaaaaatcagagcaaatcagataaatgtggaatcattatgaatatgaataacactgctccagaatcccatgatggtgagacccaccagcattctgtgggggctggtctcctggacagggctgtgccacctccacttgcccgcggtgatcacttggcccatttccccccccttgtgaattgttgaactcaaagtttaaggtttcccttaattatagtcatttgaccttcctcacttccaagagctcaggagaaactttcccatcggcgataaagcaacattttatataaattgcaaaaattaaaccacagagccaattactgcctgagctgctcacacagtgtttcaggggacgttgaagaaagggttctgaccttgagaaatcttctcagctctggttctcaattttctgacctataagataagaaaatgaactcaaccatctccagtggctcattcctctatgataaaatatctaaccctaattgtcttggcaaagacagccccttggcatcagggaggctgttgtacaaggtctgacccacttctcattcaatttattcagaaaagcatgtgttcgtaaaaccttccttcatggccaagctggcgtgtaaacggctgctcatcgcagccagcacttaagaatactgagctcttgatatggttcaaaatgaagagagacaggcagcctgtgctctgcctgagtatctcctcctggggcaccacagtctgtccccagccccaccaaggcagcaatggggacccttgacatcaagggtagatttaaacatcaaagtcccgttgaacccaggcatgaaatttccccagatgtgttcacattcaggttacaaatgaagtggaaaaggcttaagacacatgcaaaaacctcttgacaaaaacatcagggaaatatttgtggatgaattcgaggaggtttcagaaggtcgattcttccctcaaatacgataatctagcaataatctcaccaagcaatctgcatgcttgaagatggtcacatttgttgttaagtttatgtcaatttaaggtcaaatatatgtgactgtaaatatatgaccttatgtaaggaaagtatctacacacatacgtaataaatatgcaactaacatttaattaactgattctgtgcactaagtaatttccaaaggtatactatactatcatctttgatttttttttcttttcttttctttttttttgagacggttttactcttgtcatccaggctggagtgcaatggcacaatctcggcctactgcaacctctgcctcctgggttcaagcgattctcctgcatcagactcctgagtagccgggattaaaggtgcccaccaccatgcccagctaatttttgtatttttagtagagacggggtttcaccatgttggccaggctagtctcgaactcctgacctcaggtgatctgcccacctcggcctcctaaaatcctgggattacaggcatgagccaccgtgcctggcccacctttgattctttaaagttccactttacacatcaggaaaactgaggctcgggaaggtgaaacaacccgtccaagaccacacagctaggatgggcagaaacctagcagtgctggacttttcactcggctagctgggcaccaatgctttgagtctaatgcttatgctttgggttatgacatcatccttcctctcatgctgcatggaaattaagagttccctgaaccttgttaaatcaacagataacctttctgtccacacggtgaggatggcagcattcacaacctccttttatttgaccagaggtgttcagacacatgcatgtccttgataagagtcagatacaattagagagagtgcgaaggaactggaaggagctgtggattgagagcactgtgtaatctcgacctcccgtgccttcggggctaatatgtcaaggtttccacggaccccctggacacttaaggacttgtgtgcatgcatggagtactcttcctctgtcttttggaaagccatggataaaataatgacaagagacaatgctggccacctactgtgcatgaggttgtgctctctcagccaccctacaaggctggaacttgcccctacttgacctgggctgcaaatgagaaatttacagccaggagctctcagggtctgagggagagccccgatcccagggcaggacccagaggtctgatttgtctgctctgacctgataggttctcctcactctctgaaagaaagcctgcgagagcaaactggcctttgcaccccatctgtctggaatgccctctttcccaggagcctcacctctccctgcctgtacaactcctaaggctccagggaccagctctaacttcctctccttggtgctgcagcctctgctgctctagcagagggaggagggtccttgctctgagcccctgctactcctttgaggtgccttaggcccagcaacaatgggctgtccattgctggctggtttatccccatgtgtgacagtccatttgcattgctgtaaaggaacacctgcgattgggtgatatataaagaaacgaggtttatttagctcacagttctgcagccgtgcaagcagcatggtgctggcatctgctcctggtgaggcctcaggaaacttacaatcacggtggaaggaggagagggagcaggcgagtgtcacatggagagaaaggaagcaagagagagaacctttagacaaccagctcttgtgtgaactcattacctcagagagcacaccaagccattcatgagggatccgcccccatgacccaatcagctcccaccaggccccacctccaacactgggaatcacatttcaacagagatttggaggggacacacacccaaaccatctaagcgctggaggctggagctccgtggcaagcttgtgcctggactgcagcgctaaccactagcaccgacaggcctgtcctcagcttctctctggcagcagctggcctgtggcctcctctgcctctccctgcaaccagctaatgaccccttccctctagaggcttcagggtccttcaatctgtgcccttctcccccaaagcccctcgcctgagctcacagcaggctgtcacatatgctggccttgttcaggccctagaaatggcttttggatcagtgtttctttcctgcaccttcttcaagagagctgaggctcagcagggcccaggcctggccacagggattgtcaatgattcttcagaggctattgacaaggccccacctggcaagctggcatccgaggacccaggcaggacctgagccctgctgcctcagcagccagcttcctgtaggcccctgaacacactttccaaactgaggactgattctcatcatggccatactcctgtctcccagctcctgctcccacagagcttcctgctctagaaccaagctttcttagagtctccccgccctgcctcgacccaggctggcctttgcagtggaggcagccccacccagagccagagcttcaccacctctgccaactgcaagcagcccccgccttgtgctggcaggtatggcgaaaatgggagagactgagttccagttgggaggagagagagacaggagatgaggagaacatgagctcagtaattcagcttgagtacctaacacagacatggggtgagggggctccgtaggaccatgggagcgttctgcactgacctgcataggatagggcttgaataaagttttactcgaatcacttttcccaccattgaacatggactgtatattcagctctgcaatttgcacttccatttagtatttttaaaaaaggtttccatgtcaatccacactgacccataatagagctgcttcgagcatcatcagattgggagctgcagaggggcgggggacggagctgcccctcgtgctccttcctcctttcccccaccacacactcagacacatacacagagagacatacacagacacgcacacacacacaaacacagacatgcacagagacacacacaggcacacacacacacagacacataaacacagacacacacagacacacacacagagacacacataaacacacagacacacacacaaacatacacatacacacacatacacagaggcataaaaagatacacacaaagagaaacacacacagatacacacagagagacatagacatacacagaaacacacagacaagtacagacacacacagaaagatactcacatagacacacagagggacatacacacaaagacatacagacacacacacaaagacacacacatgggcacacatacagtgcagagtttctttacagccagagttcagccagagcttgcagaaaagggggagacactgatgaccttagcggtgccaccctgtcagagtatacagggtcatgtttctctgcagtggggttgtcagtaacagctaggccctgtccctttcctggagaagcaggtgtgaaaagtcagagttaccgtgtacagccagctctgctgaggcactcaagccggcacctccacctgacccggcacagccctgtgccccagtgccggtaccatcacctgcccacaccacccttgggctgcctctccctgtgccgaagctgagtaatctatactcagaactttcctggagatgggtttacagtcacaggcatgcacaggtcgtcttttccaagtagctgtgtgtgtgtgctcctgaagacctgtgcactctcagcgacccattaggccaagagtaccaagccatgcacagcctgccaggagccgacttggtgcaaggagggagaggtggctgtttgcgtgtgagctgttagggttgggcgctgccagaaacttagaaggtcatgaagtttcatgttggagaaaccagagatcagaccttgttctactgtgtgactatggctcagctggtcaacctctctaagcctcagtttcctcatcttttacagatggggctaacaagagttgtcccataacaaatgattggcattaaggaatacagtcagtgtaaaacacgcagctttctcgtagcatcactaaatactattcatcgtgttttggtcatggagagccaccatggagctataagattttatacagagatgtggagtgtgtatgagggtacatggcaggcacatcaccctggagtgagatgtctgtgggattttgtcttgacagatgcctccatgggcattccgaagtcagaagagtaagcttcttcccagaaatggaagctgtcatttccacccaggtttcagtagcatgtgcgtcactggctgcgcctcctcatcccattttccaaggtttgaatcctactgggtggcccagcaggggccccctacagggctcagggctataaggctcttgaaattaagacgtggaggaaagggggtgttaacgaagagcgtatttcatcccagcatgtatggctggttctgaaagttcctctgaccccacccttcaaccagtggctgcgttgcgggtaccactaagctgatagtaagtatgacaggaagatacaccatcttttgtttcatattttattttctcaatactgctataaaaagataattgtcacaaaaaaaatccttcattcctttttccaggggccctctttatttgttgattttcaaattattcctttgttaagggccttttctgtatcctccttgttaattttctcttccattgttactttaatgcaccggatccttggttatcagcgggtgtgcataggatgcaaacagttctctctcatcactttcattaacttcatgaaattcttctctaagatctgtaattttactttaagcagtttgcattttgtagtcagaggtttacagcagccaacaaggagcaggaagtggagtggagaaaaacgttagtatgacaaagttggagacagacagaccagcagtaacacaggagggatgtttcagaggagactagttttataaggcccagaatatcactctattctagcttctcaaaagattaattatcagataataatgacctgtccccctacaccagatgagacttgctcctaacagaacatttaaagtttcaggtaaattatctttccaagtgctgtctttgtattagttcctggagttgatgaaggtggtcagaccagagacatttatgaagtacttacataattcttggcatgctttcaatgtttaagacttgtcatagtccccatgtattgatctaaactcaggaatgcaaaagctattctcaagggagcctggtaagagattgtgtctgctgcacaggtccagccccagcccctaaattaatcccgctcaattcaaagcctcctttcttccaagttagaagtgacaggccaggtcctctctcatacaagcagctctcaggagggctccagctgagaaacttgctgtctcatttgtttctcgaacacacgccccatggaatgcatgtgtcatttctgtagcataaggaatgtgcccgcacttcatgcctcctgtctgttcgttagttcgtaattaagtatgcacagctacagatgtgtcgcggaaagacatcatccgagtcttgacaaagaaccaaaattattcatataatttatcatcccagccatcttgaatgctaacgagaaccgtccttgattggaattgtcaagaaacatttgcacccatgtcctatcagggagcatttcctccgccagatgctgcctttcataccaacgacaaagactctctcgtgctttctccctggcctttacagaaaccaaatgcaataaaacaagcagttctcccttcccccttttctctgatgcacagttttccaaagggcttgcagttttcaggttttctggtgaggggcattgcaattgttagcttgttctttaaagcctgttgtgagagcagtaacacagatctgtctaacacatgttcctagcatcagagtccagggataggtacttagatgcaagattcttttctgctcttagatgcaagattctcttctgcccagaaggaaattcaggagtgtggaaaccactggctgtttgacccaggtccacccaaaagtgacccagttttggagaactggcttgctttggggttttgctcagatatgaggacacactcccaaatgtcatttttagaggtggtggcacatttaggagactgaagagtcagtgttctgttaccgggatgaaaaggaagaagcaatgcatttggaacatattggaaggaagagatatagctccctgggaagagccttcaatttccaagccctctttgcatccttagggacagtatcagtgcttctttgggaaaaaggagagatctgtctacttattgttttgtgcactccccaagcctgctgtatgtccatctgcaacactaacttttaattcatcaagataagtaggttttgaatgtagcattttgtcctcatattcagtgttcataagttaatctgcaaattgttgttttgattggaaaatgcattaagcacaaacccatctgattatccctgggctagaggcttggtcagacccccaggaagagggctggggtcagagaggtctgacaatgaaatctgttgcagagagctctggtgggctccagttctcagcaccagagttgtgcaaggcttggggtggtctggaaaagcttcagaaaggttaccttgtgaagtgttctaggaactctgaaagagactggatagaactgaatgttcacacaggaagtggttatctccctgtaagtgtgtattattataattggccaactttttcacttcgttacccagcaggagaaacagcatacaccaacttcactagacttttgctttcaaagactccctactcacataacccgtcaatccacctggctgtttcagaggtaacttcattgtagagatggagagcctgagactggaaggtaagaccaagatgcacaattctctctcaatttcttctttatctttcccactttcctactttcctacatcagcaggcagtggcatcacagccttatcctccctcagaacctaaatcagacttatcagatgattctgagggttcagttaaccctgaaatttccagacagaccactgctcccccatagagtatctggggtcatgggtagctctgcttttaagcattctatccctcattcactgaggtccagatattaaatcagcactcaagatagtagagagaacaggatcccaccatacccacagcaattttaagggtggcatggaaatctgcctcatggaggtctgaagtgcaaagtacatgtatgtgggagaggcagatggagacaggaatgatatgttttattaagataggaaaatgtggataaataagtgagctcactcataatcctttcccaaaggaaagtcataaggctagacaaattcatgcatgtttggtataaagcaaaaattagaaactttcttatcaaaagacaccataaaacacaaaggtaggaatatgaagccaccaactgggaaaaaatgtttgcatatatataattggcagaggattagtatataatacaaataaagaacccttaaacaggtggggcgtggtggctcacgcctgtaatcccagcactttgggaggccaaggtgagtggataatgaggtccagagatgagaccatcctggccaatgtggtgaaaccctgtctctactaaaaatacaaaaattagctgggcatggtggtgcgtgcctgcaatcccagctactggggaggcagaagaagtgcttcaaccaggtagtccaaggttgcagtgagccaagatcgcaccactgcactccagcctggtgacagagcaagactctgtctcggggaaaaaaaaaaaaaagtacccttaaacaaatgagaaaatgtcgtgggaaaatggcatgagcagtcaatttcatagaagataaaacatgaatggcccagaaacatgtaaaaagtgcttaaccaggtgggaagttaagaaaatacaataaaagacaattttactcctaccagacagggaaaactgtgaagtctgacaacttcaagtgtaggtaaggaagaagagcaacagaaattctcatgcactgatgatgggatagcatattgatacaacctccttgaaaaatcatttgttattacctagtaagttaaatatgcacctactgtctaaccaagcaattccactctttaagtatatactgtaggagtcgttcttaatgcaggcattaccacaccctagagggagtcttggaagcctgcaaatgtcacaatgagtaaagagtgctactggcatttagtaagtagagcaaggaatgctaaacatcatatggtttctggggcatttccgcctaaagatgaattagcctgcattgcacatgactacatgtgggaccacataatttatgcaagtgaatgtctgttgatacttacctgatcctgcaatctaactctaactttattttacatataaacagttaaaaaaaaaactcaaatgcattgttttcctgtctttaacatattgaatttttcaggaaggcaaccacttttctgaaaaatattccttttattgaagggatattgtgctttctgttgttattgttgtttagaactttaccaagaattgattaacattatagaaaatcatttctctgctgggaatctcgtacgtggtatttgggctatcaacccaaaacacctatgactgtttgcatttgtagctggaacaatcatggtaattctacccacaggtgcaaacatctgacattgttattctagcttctgatgtaattgttcctcaaattttacatactggtccaaccaccttttattataaattgctttgtcttatttcttttttatatcacattcagagcattacattgatttcttaaaattctgtgggtaagtgggttatagtacatgatctatagtatagatagatagcattctatctatactatagataaaatctataccatagatagcacttacccatagaatttcaagaattttatttcaagatagtaaaaagaacatcacaaaatacttgtcagaagggtggtgctggtgttgagaataataattcttttggggtatatgtaccccaaagccatgtacaaaagggttaacagcagcatgactaataaaagcaaaaaaaggcaaaaaaaaaaaaagaaaaaaaagaaaacccaaaactctgaaaacaaccaaagtaaccattaacagcaaactggataaatgcatgttatgaaatactatatagcagtgaaataaattaacagttatattcattatgatgggtaaatttctgaaagcataatatggagcaaaaacagcatattgcaaaacacatatatagagtggaaacatttaaatttcagtttcagaaatgggcatgactaaatatcctatttaggaacacacgcagtttgtgaaagctatgcagaaaattgaagaacagtgaacacaaactccagggtaatggttacctggaaggggagggatgagtctgggaggggcacatgggatgatgttttctttcttaaactggatagtaggttcacgactgctcattttattattttaaactataaaaatattacataccttttaagacagaacatatttcacaatttaaaaacttttaaaaatcagaacctcccaatctatccaagcctttagttgactggactttttaaaaatcccatcttagcttgttccaaggattggcagaaagacaaatgaaactgccaggtctcttctgggtttagtacgtactctttgtagcactatgtcctggcacctgtctggggacgtctggccaggggacactgttgatgccggaatgaatcatcatgttgatgttggaatgggtctcagcatccctgcagcctcccaaaggggctatccagcctctggacaccatgggggctagcatctgggagaattcttgcagcagaatcagaggaagggttgccgttgccatgagaatgcagtcgcatctcaggggagttctgactgagttccttggccctgagtgatccattctctacctctaatgggtcacctgtcctcctccattgcttctaatgtcaactgcacaggtgcccaggcttacagaggctccaccaacccctaaggctgcggggtggagaccaggtttggcaaggcagatatcattttatttgagggattttgactaaacgggaagagggagaagctgcatattcagaatgaaaatgagagctgataacagtgccttcagcgggctagccacttgctgggttctagaacaccgcagggatgacaattctcaacctgaagaactcaggctcccccgggatcaaatccccatgcactgcaagcttctcgccagcaggggctgtgtctccatgccctggtccctggcgctgagcttggccaattctaggtggttgcagtcttgaaggaggcacattgaagaagtagctgaaagaggaaggcagagcagatctaataaatgacaaatcggtggttcagacactgcgagcaaaacaaagacctcacgttgggttagagaggcctgaaagggtctcctgtagaagcagaactagaaagaaaggtgggtatgagacgggtgcagaaggaggggctggggtcggggacatcggggtgtggaaatagagaagaaagactaggaggtgggcagacacggggagctgccaggcatgaggggcaggcagctcttgcagtcgatgggtgacatgttggctactgccacatcttgggggccttagatgctgcactgagggtccccggtgtagttttgcaggcaacaaggagttgtaaacgatgtttttgtgtcccgtccctggcccagctcagacttcagctgcaactctcctgccagggtcagctcccacctcaagcaccttctgaatttctgtacttttcctccctgggcccttccccatctctgtggagctccctctgctgcttccagcaaaacccagaagtgcagcagagtttttggcctgggtgggaacacatgcccaggccccatgctgcagagtgggcatgtcctaggcacggaggagcaggttttcagaggcagctcacagaactgagccccagtggccgcaggggtgctggctccagaaggcacgctggtgggacattctcccctttccagtaggctgcctgctccctcactctgccccacctctcaggtcctggcctctggcctaggtttcagggaaacccgcaagggaggaggggccttggacatccaggggagggaggctcctggagatgtagccaacagagatgaaactgtgaggagagaaggacagtcagaggccgccaagggctgtgatgcgggcagggcaggaggcagttgaggttagagacagacacagccagacagagacagggagacagagagagacagagacaagatagagaaacagagagagactgccagagacagggccagacagtgagaagacagagacagacagagagagggacagatggacagagagaggcagagacagggaaagatagatccaaagtgacagaaacagaggaagacagagactgggacagacaaatagaagacagagagacagagagtaacagacggccagagagagacagagacagagagagtgacagagggccagagagaggcagacacaaggaaagatagaccaaaagagattgaaacagagaaacagagactgggacagacaatgagaagacgagagacagagacacagagagaaagaaagagatggagagacagagacagagagtgacagacagacagagagtgacagagagacagccagaagagagacagagaaacagacagaaagaggcagagacgagaaagagaaacatggagagacagagaaacagagagcaacagagacaaagagacagacagagacagggacagacagtgaggagacagggagagacaagcacacagagagaggtgccaagcaggctggagctctggagcttccagaggcctgggcaggttcagctctggagagacactgcagcttccctggcgaggcagggctgtgggcactgggctgtccattgtagggtggcagtgctggttctgcctgtggggtggctccagcctggctcctgggatggtggcagccccaggggactgcctcattctgccacctgcccattccctggctctccttcacctttgtccctcaccggcagcagaagcacagatggctgttccgtcatccagcacgtgctgcggtgcatgtcacagggcaaggtgctgagcagctgtctggtccccaacacctggtgacaccttcacaagcacataaatcacactcatcttgaccaacacaaacacattcacatgggacagatactaatgttaatgtttaacctggaaagagccatacccagcgcaatcggtggtgctcaggtcctggaatgaggcagccacggggaaccctggtgcacagggacctaaatggaatcactagtgagtggtgaccacggtccaccccgtctctcactcccctgatttcacaccctaggcaaggcactgagcctgggtttcctcttctgtggactgggaacagcccagaaaattgctgtgggcctctagaggggtcatgcatgggacacagtgagcctgggcctgccgcacagacatgccccgtggaaggtggcttttctggcggctcaggctcaaccatacccctgctgccttggcaggctttctcagttctgcgtagctgtccaacactccgaccactgtatgcggctcagtctccacttctgtgagatgctctgtgacctggtaggaccggccacccctccgagccccacacgctgccctgtaccgaagctttgttgcatacaattgcaaatctgtaaatgtcactgtgtccagtgggccttcattgactggccctgtgtgatattttattttgccctggttcattttcttcagaacctttattacgacttgcaatgagctactttttttttttctccatctctggtactagatgctgactccagggtggtggccgggaggttctttgttttagttccagatctccagaaacagacctgagacaaaaatctgggtgcacccaagacagaaatcttgggtgggaggtgatcccaggaggcctgtgagggagcaggaaaccaggtgggaggagagagaccagggtcccaccgtgggtaccaggactcatctgctcaggagagaggctgtgtgagacacacctccaaggtgtcctactccagaggtgaggaagccagtatttatttaccaggccccggattatctcagcatctggacatctgtgccaggtgggcacctgcccctcccctgaggggatgccttcccacccctcctcactccggcctccacggatcttctcacttctcttggggtgacgatactattgtgtctgccttccagtctcttttggtctctgggcacacagctcaggagtggctcctgaggacaggccccgcacccggggaggggaggcagatgccgcactcaaagacctgtccccaagaagtgctccatgaacaggatttggggaaaaaaataaactccagggtgacaagagctagaagaaggattgaggactattccatggggtcacctagatctgggggtgggagaagcaaggaaggcgtctccaaggaggggcaagggcctgggtgtgaaatcacacaggatctgtccccacatgaaggagaaggagacagggagatgcggctggaggaacaacatggatggagtctgtggggccagggggaacaaggcatatccaaggacagctagagggtgcagtggggggcctggagggagggaggcagcaggagctcggtggggccttggccacagtctaggtacttgggatcaggcctgtggttgcctgtgagctgctgaggaaccttacctggtaggtgatgtgataggaaatgcttgatttaagacgttgatctgtttggcagcctttggaaggagggcgggagggcgcgtgaagggacacagatgccccagccacggggtggcaggtagatttaggtgagaggtgggaggtccttgtctgaagccatcttggggatggagaggagagaggcaaatgtggacactcagccctgggcccaagaagatgttccactctacatggagagacagggtaaggagaggtaattcccggctgagggggcaccgagcaagggcatggaggtgggagagcccaggaatggcgggagccttctgctgtgctgccgagtgtggtcacgatgaagactgacatccggagtgtttagaaaccaccgcagccatttgacagagtcatggagtatgactgttcaatccaataacatgaaattgggggcttgtattttgtatggcttttcttttaatttcatttttctcataattcaagttttattgaattctgcaaaaatattggcccgtgactgatgggaaacaaaacacctggtctttctctgcagctggtgggggttggggtgggaggcgcgggttgaagtgccctccccatcagctcccataactctgcctcatcccagagttttattttttcttcatgccagaaaagtccctccccacactgatgccagcaagccaagcaggatgtccccacccccaacgctctgtccccagattctcctagccccaaagacatatcttagctcagatgaggtagagaccccctcaccccagctcaggctgaaagcgaatattgttcagtctcttatccctggggccaagcccgtgtaggaggattgtgtggtgaccgcagctggcggctcccaacctccagtccctgctgtcggcggccaaggccttggaggtcattaatgtggatcggcactaatggattctctgtgctggctttgtcccccagcgctatttttaactcattttggactttgaattgtccaaatgcattttgatgtgtttgtgagaaaggacataaataaacccttgagtgttgtttctgtgcagctcctcagaaaccaacttctcatggctctatttgctttgctgagagctgagcatttcctgcaacttaccaagatgggctgaggcctgcccagcttccagagtggcacctccacatgtactcatttcagtgccactaaccaaagcagtgcccattctcctggtagagtttcagggggaccccctctcacccctgatcaaagagcatggcagcccagtagctgagtacctcctgtgtacaggcacctgggagcttacgatggggcaggcactgtgggaaaagcaaaatcagaggccgacagtcccgtctccaagatccttcagtgaactgcggtgactgtgaacacacaggaaaccaagaggtacacgcccacaggccaacccctggtttggggacagccaggcatttatgaacacattcttcaggcagtgtttggcctgaatacatgtgctgagtccctgcctgttatctgaagcctgctcaaaggcagctaagatggaagatgtggcaggtggctgtgcaggcagcatatgccacaagccacagctgtctctttgacagtggccagggcttccttatatgagcagttccctaagtcactcaggtctggaggccagggattctggccatgcttctcatcttggccgggcccccagtgcagcgtgggcctaaaccatgttctggattcctttaaacacctcctgagcgcttggtgtgctcaggacttgagccagccttggggtcactgagggagtagagtccagcttgtgtctgggaaggtctcctgttggcagaggagaaggtcctgagctgtggacaccagtacagggccgtggtccagcctttggtgctgcaaagaaccccacctaagtcactcagacatgacactgtcttgaagacggagaatgaggaatggagccagcctcaaatgtaggagaggcgctaactcaatatctccaatcagaagaaatcagaaggttccttatttcaaaaatctctacacatcaaatgccgtgattggcccaatggctcaccagtcttcagatcaagtgtagcctgagtgttcttttaaagtgtggctttctagtatagagaatctccatgtcccatcacattggtttggatgtgtttatcaggctcattcatctctcatgagaacgtgtagagtttaaaaatctctaaagaaatccctggacgtaagctggtgtcttgggcttgggtagtaccagataaaacgaaaacacagacagatttaacatgcttaggggcaagcatttccaggacttggggatttattgggttgggagtgagagggaggaagacactgactatgattcctggcttccatcctgggccccctgcaaatggtgattatgaagatggtgggttggataggaggttctgagttccactttcagcatgctcactctaagtggctgagacgatggccagtgaagagtgttgggtctagaagcctgaagctacaggtccggctatggagctggatttggatgtggttggcacagagaggacacgaggccatgggagtaaagaaaatctgcagagtgcgaccagtataaacagagccgcatgcattttgccctggaaattctccttctaaaaatgtattccaaggaaatcatcagaaatgtgcaggaggggaggcttaaggataatcatggcagagttatttgtgcttataaaaactggaagtacccaaaatttccaacaagaagggcaaagttggattttgttccaaagcatggaatacaacctagccacaattacatcggtccatcgtggtgtggaatgctcaagtgctgggaggagcaagccagttccaggaatgcacaggaggcaatgggtttgtgtaggcatgtgtgcatactcacacagaaaacatcctggaaggttacacactgaaatgttagttccgatgatctgtgagtggtaaatttcaagatgaattgggattttctcattttcttctttcctatatatttttttctttacattgattctgagcctcttttaatgaggaaaaaaaatgttttgggtaaagcctcccttttggttcactagagacagcaccacagcagagctgggaacagttgtttaaacatccccctccctgactttaccttgggtaaatgggcctctgaagaaattccactgagaggccccctgccctcacattacattgtcaatttcatcctgagcactctgcgtaaataccattccagagcattaggtcgcagccattagcatggcagttatgtgccagcttttcctctcagtttacagcccttatcatctgcaactctgctttaagaacttaaaattatggtccgaccgtagcctacataaacattcaagaaagtcttaccatttggagagctgtaaaatgaatctgacagtgtgacactcacgtgcagcttcataaagtgcatgctaacgaatcagctgtcctgtcttcccagaagcccccagagcttccaggagccaatgtctccttggagcaatgctcaggagccattgaggccaggcacaagcacagcctgcacagccactcatgctgcttttcttgggatggaaaaccagggccttttctggactctaacagcatcgagttatagctcaaaagttgctcaaagtatcctctgccttaatgatcccagtatctaaactgaagcttcctaaacttcccaaattaaagacccttcccattgccacctgccaccagcagcactgatgaaatgccctctggcactgaaaccatcggtgtttggcataaacacaatgaaattcttgtttgcctccaaagtgtcttataaaagcttatccctcttagaccatggtcccattctcctgacaatgtagatggtacaaaaagcagccatccatcccgaggggctggcccagatcacacatcatggatggcctgtggttctgatccagcctgcagtggcaccattgcatatttacattttggatttttactaatttatttatttatctgttttttcgagacaggatcacccttggttgcccaggttggagtgcagtggcattattatcacagctcattgcagcctccaactcttgagctcaaatgatcctcccacctcaggctcctaagtagctgggacttacaagcacgtgccaccatgcctggctaattaaaaaaaaattttttttgtagagacagggtctcactatgttgtccaggctggtcttgaactcctgagcaaaagcaaaagcaaaagcaaatgcctgggcctcctaaagctctgaaattacaggcgtgagccaccacacctgacccttcaccaacatttttaaaacttagagatttcacagaaaaaccacaacattcattctcttgagaaaattgagaagatgtgaaacactgggcactttcgcagctgctgcaccttttagacaaagcatatgcttcccttcgactgctgtgcaatggaccaaatgcttgtgccacacccacccccccacccaaagttcacatgctgaaatcctaactcccaaggtgatgacattggagctgcggccttcagtagataagcaggtcatgggggtgtgaaacctcataaatgggattagcgcccttacaaaagagacccccgcccccacctaaagagctccctccctgtcttcctgccatgtgaagatgcaacaagaaatcagctgcctgcaacccgaaagagggccctcaccaaaacctgagcacgctggcaccctgaccttggacttgtagcctccagagctgcgagaaataatggttgcttgttagagccactcagggtatggcactttgctgtagcagcccgaactgaccaggataccctgcctacctggcccatttcagccctgaactgaccaggatgccccgcctacgcgcccgtttcagcccggaactgaccaggatgccccgcctacgcggcccgtttcagcccggaactgaccaggatgccccgcctacgtggcccgtttcagccctgaactgaccaggatgacccgcctacgcggccgtttcagccctgaactgacgaggatgccccgcctacgcggcccatttcagccctgaactgaccaggatgacccacctacgcgggcggcccgtttcagccctgaactgacgaggatgccccgcctgccccgcatatttcaaccctgaactgaccaggatgccccgcctactcggcccgtttcagccctgaactgaccaggaggccccgcctgcctgaactgtttcagtcctgaactgcctggactgtttcagccctgaactgaccaggacgcaccgcctgcctggactgtttcagtcctgattgatgcctgtgcagctttgggaggcatgaccgcacctcctcctccctacacaccccagtgggggaagaggagagaaaatacgcctcttccctggctcttcgctggagtcttagtgatttggtggagatttccaaggacaggcctccgggagctcagcgccgccctcctgttactgggcagttaggtgtgggaaggaacatactgacaacccatttttcttcaggaaaatcccattcaccacccttgaccttatattgctcagcccaggggtgtacatgggggaagtggtagtcacagggacagtaaggcaagcccagtctgtgtctaatgactatttcttcttcagatagttgagaatttaaatgtgaatgcaaatgttacgcaaatgaaattactcctaagacaatttacacagaccaactattagatcagaacctcctgtttaacacagcctgcccaaaataactgagactattccgatcttttgggcaaggatgtcgacacactgccagtgcctctggagttaaagtggagcgctgtctttgggattgggagccagctctggatatgaacacggctatctggcaggctttggcctgccggagagaaatgtgtcttgtcccatgagaaagacatccccaggctcacctgaggagccagaattgctggtgagggcccaggtgtctctaaattgattgctgcctctgatagactattctaagccacggccatctcgtggagaaattaaacattctgtgtgaaggacatgcatgtccttaacagaacagtgaagttgctgatgcatttttattctcagccaccctcacggcaccccagtacctaccccatgtcccagcctcatggggccttgctctcatctgcccattagctaatctgggctaagaagatgtactgcacaaaaagaaagaaggaattcaggcttttaaatgaaatgcccaatttgtaactgttggctaccaatgcaattagttagaaggtagttctcagacaggtgggacagttcttctcctaacaagcatgtgtcaaagcatgcttgtttcttctaacgttttgtttttctaaaaaagtgtgctttcttcttctaagaaaatctggcaaataaaatgttattctcctcatgttaactggaagagtcccttgcctccaaatcaattctatccccaaatgttgaaagacttgaaattccacgagtagatcaagggcatccccctgaggcctttactatgggaacagacctcacccccgctgctgtggtaactgtagggacccgcttcactcatgctgtcccttggcttctgtagacacttgagtctgcagcctcagaacagggctgatctcaaactgggcctcagtttgaggggtttcacccacgagtgactggaggccagcactgaaggctactgtgcaggactgcactctgtcacaggatagacctgctacatccagaggcatcccacccctgttcatctcatcctgggcactgtttctgctcagttctcaatggcaggcttttggccctctgaagtcagagaaccaaacccactgagaatttatttcttctcattagagatttctggattccataaataattaattcagaaggaagacacacactcttctcaaatgggaggttaaaatcagggaggactccttcccaagcttctaggtccatctgttgccatcagtggagatgatttggaaactgctttcaccctgattctggggacttgagccatgcagtcatccctctagaaaagactgcagggcaagttagagaccccatatagagtgtgtgatggtcaattttgtatgtcaatttgactaggataagggatgcccaaagagctggtggaaacttatttctgggtcctttctttctttcttttttctttctttctttctttctttctttctttctttctttctttctttccttccttccttccttccttccttccttccttccttccttccttccttccttctttctttctttctttctttctttctttctttctttctttctttctttctttctttctctccttctctccttctctccttctctccttctctctttctttcgatgcagttttgctcctattgcccaggctggagtgcaatggctcaatctcagctcactgcaacctccacctcccaggttcaagtgattctcctgcctcagcctcccgagtagctgggactacaggtatgcaccaccatgcccggctaatcttgtatttttaatagagatggggtttctccatgttggtcaggctggtcttgaactcctgacctcaggtgatctgcccgtcttggcctcccaaagtgctgggattagaggcgtgagccaccgtgcccggccatttctgggtatctctatgcaggtgtttccagaagagattagccttagaatcaggagactgagtaaagatctgccctcaccaaggtgggctgacatcatccaatcattgagggcccagatagagcaaaaaagcaaaggaagagtgaattctctctcttcttgagcttaggcctccatcttttcttgcccttagacattggagcttcaggttcttgggcctttggattccaggacttacgacagtgccccttggttctcaggcctttggtctcaaagtgggagttgcaccattggctcccccagttctcagggctttggactcagactgaactttaccaccagccctcctggttctgctgtttgcagatggcttatggtgggacttcctggccttcataatcatgtcagcaaattcccaacataaatctctccttatatatataactctagctatccatccatccatctattcattcattcatccattcatccacacatctacctacctatctgtctacacatatttatcttacttgttctgtttctctgaggaattctgactgatatagaggaattcactgggatcacaagccaggcttttaaagaaccactgggcctgggctgcttctgactctgaatactccatgttataagatagcaataataatacctactttagtttgactctgtgaccattagatgaggtaacatcttataaagctctgctcttaataaacaacatctgcaactgttgttgttgctgctgttatttttatatcagtcaaggttttttaattgcaagcaacagaaatcaactctggctagcttaagcaaaagtgaaatttaatgggaagatattacagaatgcatcaaatcaaaggaacaccgagacagagacatgcaagaaacagaaacaggggccactccagggacccaggcaggcggggctaattggcagctcatcaaccctaaccattctattcatccttgcctcatgtaccttgagagtcgaagtcccaagaaagaagccaactgggctgtcttttgtcacattcctattccttgcctaatgcagtgagagtggcagggtgccctggttgacaattgcagccagcctgcatgcaacagagcagagggaaccaaagggaaccagggatccttttaccagaagaaggtatggctgccacacaaaataagcacatctgatgcaaaccatctttgacatgtgcagaagcttactgtcctctgttcttggtatgactggatgatgtaggcagagcagccagaggcatgaccgtcagctttcattcctcaagaatgggatttttcttgtgcacttctcttttcttatgcatagtcctcaatcaccttggccccagagcctgcccagccagacttagcaggactgggtcacccagttccccgtggcagaaatgtcacagtcattcaggagcatccacatttgggctgggatgacaacacaaatcctgcagtaatttaacacctgctctgcttttatgctgttattaaagagttttagcttaaatatttgaggtgtgactctgctccctcatgcaaatacgggtgcagaatttcccacctggctcattgattggtgggatctgaaatagcccctttatggaaaatggtaaatttcttattactgcctaatgaataaagtgcatatgatccagctgcagcagctccccactcccctctccttcccagggaaactcatcccattggtaattgggggaatgtaaatgctgcttcatggcttaattttcagatgttttgaaagacaatatctgcagcaataaaaggctcaaagacatctgagatatgttttgtctcttgtcctaattatactaataaataaatagtatttgtttccctgcactgtaaaattaaatatctttctgaatatctcccctcctattttaatgaggagaaagatgctcccttgatgagaatgacactgtagatgaaaaacgagaaagaacaaagaatgttaaccatctaaatacaataacatgagaagaactgtttcctaagttctgagtatgatctctgggtgggatattctccttctcatcctctttgtctggagaaaatgtctctcaaatgtatgctgtttgggatctctgtaaatttgagtcctcaagggaattactgttgccttacctacagatggcaccttgtggggtatcctcgaacactgccaagccttggcacccaggaaccaaatctccttgtaacttctgcggaaattgtgagaacagggatctttccatcttactttccaccgtcacctgagtgcctaaagcagtgctcagcctgtaacgggtgcccagctatgtcacatttgtttcaggagcactcctgtggccctgccaagtctcatgttcaagttggatcccagcgttgggagtggtgcctgacgggaggtatctgggtcatggctgtggataccccacgtgtggcttggtgtgattctcactcttagttcctgtgagaagtggtcgctgaaaagagcctggcacctctcctttcttgctctcttgctctgtgatctctgcaaatgtcggctcccccttcaccttcccctctgagtggaagcttcctaaggccacaccagaaacagatgctggcaccatgcttcctgtacagcctgcagaaccatgagccaaatcaacctcttttctttataaattacccagtttcaggtattcctttataggaacatggactgagacaagcacagatcccaggaactgggcagatatctgttttccataggctgatggttgaggtcgcagctctgcccctcactgaccggcaggtttgcagcaagcctcattctccatctgttaaatggggatagtcccaaagaaagacagctgtgactgaattatttttattaaattgtctgcccagacctcagtctctccaaccacgaaagagggatgtaagatgagataaccatgaaagtccattgacctcggacacggtgacactaaataaaatgttcttagtacgctgactcagaaactcctcaaactaactgccaaagtgcatgggctgatccccctgcccccatgatgctgctggctggagggctgtcctgaagtccagtgggcagccaaggccacgcctgtgcctgcaccactgccggccctgccctaccactcctctctggactcatgtccatatcacagctgattgtgaaatccagctccagcatgttgtatttgaggagcttatttctcactaaccacatttggcccacaggcaaggcaattaagggtgttcatccatttactaaccccccaccaccccctgcagtgccccgagagtgggaaggtggcagagctgctatgcttcagagcaggttccctgtttccacttcagagcccacttggcactgcttgaaacgccctggatgtttgttatgaaagattattgggaagcagtgtgactgggcatgctgcactgcttacaacagaatgggaatgcacgctgcctgccgctgagtgggagagccccacccagctctgaggcaagtgtgactcacagctccctggcctctccgatcccatggagctgaggccactgggccttggtgaatgttatataatgtctcacatggaagaacatgcctaccgccaagggcaggggttctaagtcccagggccagacagggacagggtggtccacacccctgcctccatgctgctgctttctgaaaacataggctgcagaggctagcatgtctctcaagtctggaatcttgggtgggcatctccaaatgttcctcttcctactcaacaggtccagaactggccttcagattcccagtaagaggatgtgtgaggctcttgcaggagtttgcagctacctgtgaattatcatgtcaagaagcaaatttgtcatccactcttgtgctttgctgagccctatcctggtgtttgactcagatgctgctgtccgcagaaactggcccatctgttgaaactggcccaattttcccatagaactgatgtttgtgggttttttgaataaatgtagaagttgaccctcccagtcttcaagcttgagaaatttacatttgtccgatttcctttttcaggaagctgaccatcaggctttccaggtagtgtcagggagctaaagctttccagataattgtatccaggtggtgaggccacctgctgcctgttatcagctcctgtttaaatgaacccctgacaatagtcacttagggagatggatttgagacttgtctcccatcttctggctggtgtcacccacaacaaagcctttcttccctggcaatactgattgtttcagtgattggctttctgtgcagcaagtaactggatctaggctgaatcctaggtgtgcagcaacaatatgggagccaagaaagcccccttcaagccaggtgtgacttagcagctccttctctttgtggcactgtctctgcacttctctgtctttctccatccttttgaagaaaagggggaataaataccaagagaatcacaaccactgcctccctgcaggagattcatccccctacctcctacctgaaggtgtttgcatggagcatgcggtggggagagctctttcctgcccatatgaccccttgttcttagaatcctggagatgattcaatgaactttctgtttccagtgataaaactcaaaataaacagaattaagtgaaaaattgggcattggcccccagtaaaaacactgtatctcctttcactcctgtctccctgaaggccatcttctctcagcttctccctttatgaagtctccatcagccctctaccctcgttccagaattgagtttcttcttgtctggtatgtttacagccccaggcgtggcttacttcccctgtcattttccactgttggctagagaagggatagcatgaccttctagtctgtgttgcagtctgccttatttcttgttttcttcaactgttccagagcatctaaagtaaacgagtcacattttatactgcaaaagacaatctgcagaagccctcattggtgcatgggaagaaaattatgtcattgggttgacataaaatattcctgtccttatgggtctttcatgtttctgcatgtcttgtgagcagagggactggctgcctttgttcagaacaatcttaaaaagaatcactgtatagtgaacagccttggaaggtaaagagaatgtctccctctagagcaaaggctaggtttgcttactgcccaacataaaagatccaggttctcaaagctcagagctcctctcctgcaacacgtccactgagtgtgcagatgtcacctggcttttccatcaccatgtgggagtcagggctcaagaaactagcacaagaaaatgttgatacttgggctattgctatttctgtgagtaataaagttctttgtctctgacctaggagtcttttgtcctctgccaatgtccatgaaattgtggcaggctaattgtgatgttgtaaaatatatatttggtctttgacaccatttcctggcatacaactcctaaattccttggactcttccaagtgatgtcttcttgtatgctaatgaattggctgatggctgagagctcctatatagcttcaagagagaagctggtcatcagaaagaccaaggcaggattagagtgttgggactccaggaagtggggaggtgctgaaggttaagttgatcaccaatgaccagtggtttaggcaatcatgcttatgtaatgaagcccctgtaaaaacccataagaacagagttcctctcctagttcctggaaaacttccagatagacaaacacacagaggttcctgcaggatggtgcaccccaggtagggcatggaagctctccatccctttccccataccttaccctacacatttcttcatctgtatcctttgaaatattctttataataaactggtaaatgtaagtaagtgttcctctgagttctgtgaaccattctagcagattaattgaacccaaagaggaggtcttgggaacccccaacttgaagccaattggtcagaagttggggtttccaaggtcccctctttgggttcaattaacctgctagactggctcacagaatgcagataaacactaatttacatttaccagactttctactagtgcctgaagtagggtgggatggtcttttgggactgagccctcaacctgtgggatctgatgttatctccagttagacagtgtcagaattgaattggaagacacccagctggtgtctgatgcagaattgattgcttgcttggtgcatgggaataaaaaaatgcaacatttttccactgaattcttctgtgttgattgtcattgagtgcaagaatgtgaaaaactttgtgttttttctactcactaacttatcttgcaagtaaggtaaaatctcattaccttcagagttcctgacaattctctctgctaatgtaattttggctgtacaatgctaaaagcacatttgtcctctgcccaatcttaggttatagaatctaacataaatgatgacttgcccaaccagttcacctaactgggttctgcttccagggtaataagtaaagggtagttcctatacagacatcttacatttcttgttaaagtgagtctttgtttggtccttccaaatggctcctggaatggtttatatctgtccttaccaaatctcatgttgagctgtgatcctcagtgttggaggtgggccctggtggcaggtgattagatcatgggggtggttcttcataaatagtttagcaccatcctcttggtgctgttctcgtgatagtgagtgagtgatcgcaagatctggttgtttaaaagtgtgtggcaccttccccatctctcccttcctgctgctctggccatgtgaagtgctggctgtccttcaccttctgccatgattgtgagcttcctgaggctcccctagaagctgagcagatgccagcatcatgcttcctgtacagcctgcagaactgtgagcccattgaacttcttttctcataaattacccattctcaggtatttctttagagcagggtgagaacaaactagtacagttcctaccgtgagacctgccagtactgaggagagaaaggtgttccatatgcatttgcatctggctttgccgttaaacagcaccctttccagatctccagagaccaggtggtaggaaaaacagaaggttgagatagagggttccaaacactctctgatggatggcattgcaacttgtcccctgtgagaccctcacaaatagctggcatgcccatggcctcccccaacagttaccattcctcactgcactccaagtctctccatagccacccccacaaccattgccaggtaggctcactgggtgtatgcccgaagtttccatgtttaagatcaattccagaaggtctctccatgaaagagtggccccagcccctccaccaccaggcatggtcatctccccagggctctgtctgaaagagctttctggtaatgcagttgacttacagaacagtaggatgtgggacagtgaagtttcaatagaatgaaaggtcttgagtaaaagcaatgccctgtctggagcagcaggtctggaaaccaggagcagggatagctgagatgcagaaaaacccagaagatgaaacgggagaacttctaagctgtcaggttcaaaaatgtccctaagccttttgtgtcctgctctcctccctgaagacatgtgaagacacaggaatacacgtgtcttctcctcccctcttacgtgaagacacgtaggaacagtatctaactgaggcactcacacgatggtcatcttcaaataaggaatggacttttctgggccctctcacagccgcctccagcacttgacttcccaaccccgttctgagctcctgtgccggagagtctgggctaggtcagcggggtgggagaggcatcaaagcagagatgagtacacaggcacactgcacggagcaagaggcgttatagtgtgatacagcaagaggctgtggaaggagcagagaatgagtcctaggagggaggtagagaaatcagggaaggctgcacaagggatgtagcacttgagctgatcctgaagtagaaggagaagcccctgctgggtgaagagtacccatcttacagaagtgtgggagccaaactttcacctgcaggagaaggcacttctcacctgagcttaggccaggggactccctgctctgaggccacactcctgacagtggtcacatctctgtccgacagctatcttttgaatgtccactaagtgccagccactgagccagacaccggggattttatacattatcaagtccctgctgccactgagaagatagacaaacaagtaaaaaaatcataattttgggttggaatcagtttgtggaggatataataaaacagggtgatgtggctaagagcctttgggtcacagagagggcttctctgaggaggaggtctctgaacatagacctgaatcaatgtgaagaagccagctgtggctctggggaacaatgagtcctggcccaaatgtaggcacagctgtcccaagaccggcatgtctgaaaaacagtaagcacacacgcacacacaagcatgcacatgcacacattcacatacatgcatgaacatgcacacacgtgtgcatgcatgcacacgtacacacatgcacatactcatacaacgcacatatacacttatgcatatacacatgcacacacatatgcacacacacatgcacatgcacacacatgcacatacacatacacatgcacacacggacacgtacacacatgcacatgcacacacatgcacatacacatacacatgcacacacggacacgtacacacatgcacatatacaatgcacaaacacatttatgcaatacacatgtacacacacttgcacacacacatgcacacacatgcatgtacacatacaatgcacatacacacttatgcacacacacatgcacatgcatatgcaaagcgcacacacatacatgcacacatgcacacacatgcactacacgtgtacacacatgcacatacacacaatgcacatacacacttatgcacacacacgcactgtcctatggggctggagcagatgggggagaggtgggagatgacgtcagaggtgcgtgtctgacagggtctggagagcactttgaaaacataaagagagacaggaaggacttgactgtgaacccactgctttggctgctcagagggcaaactgtagggtctagggtatccctgtgctcacagaaggaggccttacccagtggactctccccttctcttcagattcatccaaagctggaacagccctggaatctcagagaatcaggatcttctgtctccagagaagaggggagctctggcccccttgtagggaagcagcttctggactctcctgtctccctgcagccaacaaccttcttcccagcaacccccgacatacacccctgccaccctcagtggttcccgacattgatgctggtgagggtgagtgcttcacccagtcctcagtgacccgcaggctccactaagaggtccagaggggccctgatccatagggaagaaagcagaggggccccgacacagctccacggtgctgcaggcagggctctcagtgcctctcagtgcaggcttctgggaaacagactacccctcaacaattctagtcacattcccttcctccataaatggggccagtgggatatggagaaaatttgtctggtttaactaggattaccctgaataaaccattttcctcgtcttgatttaccattgagaagctgggccctgatgaggctgtgtgaattacgattagcgtcctgccctgcctggggtttaattaattcgtggggctggatgcctggatagctcagggcactccctgatgcttggggctagcaggcagaggcgcccagcgcaagtgcagctcactgaagcttccgcactgggcttggcaacggagtgttaccttctcattagggaaatggggagtggagccctccagaggctcccaccccctggactcctggttcctagcccccagtccatagtccagcagctctcctggtgtggaggacagggacttctccattccatccctttcaatctccttcacagcaggaaggattcctaagtagcatgattaattagtcactggagcaagggagggaacagagagagacctgtagaggtcagaatttgaagagcccgtggaacccagaaccaatcactgttcatccccacctccctgacccccttggtcctcctcctccttcccagccctccgcaggctcccctcacattgactgtctccactcgacttcagggttccctgagcctcttagggaaaggacgttggaacattagaagggccttggaggatgggaagtgaggtgagtgaccccaactgtctggtgcatgctgttcactagctacatgtattttgtttgaactctagaattttgcaatttgtgcaacttgaaaaaagaagagttcccgtagaaatcaggatttctggaaaatctgaaaatgttgccacattgggcccgcattccctcctggtagcagactggattaaacagggctgcctgacctgtgtagccactatggcctgcacgccttgctcacctgaccagctccgcccctgaacacacctgtgtcagggaagctcaccttctagacaggggctgggcctgagaggtacccagaagccaggaacgcaggaacagagcacaagacctgctcaggaagccacaaaggcgctccccaccttggggaagagtcactgctaaccaacagtgggagcggtgtgttgctggctttctgcaactgggctgagagggaggcatcccaggcaggagaaacagctggaaccaaggcctaggggaggaaaagctggggaattttaatgccagctaagttgatgttaaatcctggtgacaggccaagcgtggtagcttatgtctataatcccaacagtttggaaggctgaggtaggcagatcacttgagcccaggagttcaagaccagccctggcaacatagcaagtccccatctctacaaaacaaaaaaattagccagatgtggtggtgcaagcctgtagtcctagctgtttgggagactgaagcgggaggacatcttgagcccaagaagtcgagactacagtgattgcaacactgcactccagcccgaatgacaaagcaaaactctgtctaaaaataaacaaatacatacatacatacatacatacatacatacatacataagtcctggtgacagagaagttctcaaaactccttcttggacacattttacaatgtttgtaacatcatagacatcctccatttgacatggctcaagcagcctctgctgtgaagtggcatctggaccagaaacagcatcatatcaccacacatggatgtctgatgtcttcttttgccttaagaaccctggtttctgtcatgaggtcaacctgtcgaggaaggaggcaccatctgccctcagcaatgctgggggctgccaggggatgcgggcagtcagcacagttctttttttttttttttttaaagtctcgctctgttacccaggctggagcacaatggcacaatctcagctgactgcaacctttgcctcctgggttcaagtgattctcctgcctcagcctcctaagtagctgggattataggcgtgggccaccatgcccagctaatttttgtatttttagtagagatggtgtttgccatgttggccaggctgttctcgaactcctgacctcaagtgatctgcccacctcggcttcccaaagtgctgggattacaggtgtgagccactgtgcccggcaatggcacagttaattctccagaaagtttcccttgcatattctgcatgtattgggggtgcatatgtcccagaagtaatagtgacaagcaggtctgtgcctccacgaccaagctgggctcacagcccaatgagaccttggttctctctgctccctccttgctcgcgtgcctatagttagatggaaactcgacctccgtctgccagggaggcccagccaatggccaaccagcaggtctgtggccctgacacagacatttatgtccctgcaatcctcagaggcttcgtgcattattcagcacagttcccccagccatgccctggccctgtgcagtctccagagggtttccagagcaacatattttggagctgaattacaagatcagacagttggggaaattcctgctttaacacaacacctctgagataaaatttaatggtggaagaaatacggtattttgaaaacatgaaaataaacattctgcagaaccgggatacgaagtcgcacagtacagcctgtgaaagcctctctgtcacagaagaggtctaataatttttaatagtcctgtaaatctcccttatgagatgcagctactgtaaacacttctccataattttttcaagtatttatgtagtgctgttagaagttattaaacgcgaatgattttcattgataactctcattctgaaggtgctgccaaccagctcaacctaaagatggtaaaagggaaagtgtcccccacagggtcaacttgggctgctcctgggatcttctttctgaactaaaggcagtctgggaccattctgaacttgcctggtgatcggtggcaaactcattcactcccccactgccatctcccacgttatgaaatgagaagaaatcattcctgcagttcatttatcatttttgcatgtattagcgtgctggcaggcattttacaaggccctgggaatagaacggcaagaaaaagagacaccattcctaccttcatggagcttgtggttccaaggcaaacaggcatgaatcaagggattacagaagacggtgtaaaattgtaaatgtggaattattgtaaagggaagctaacacaggtcatgggttgggggagcatcacagggagatgcccagtcttcaaggtctgagaaagcgtcctcttggcagaaacccttgtgttgacacctatgagatctgtaagactagaagaggccaaataggccaaaaggggagaaaaacaatggaagcaggaggagcaccagcaaggccaatgtgtgggaagaggagtaagacatgttggaagtgagaaaaggctgggtggctgggaaaaacgtctgatgggaaacatggtcggagaggagcctggggaggaagaaaagagccccgccaaggagggccttgtaggacaactggtgtgtcttcatcccactgtcaggggagggcctttggagggtttgcagcagagtagggaggggtgctatagatgagtgtgcttttgaagcgatcactccagctgcaatgtgatacaaagacaagggggttccgagtatcaacagatggaccagcaaggattctgctgcatgcctgagacagcagtgaattgaggagggatgaagaggggtcaagggtggggcggggtggtcctcaggcttctagactgtaccatttaatgaagtgtggcaccattcactgaaatggaaacatggcagaatatcagggttgtggggtgaaggtcatgagcttgtttttggaccactgagtttgggatgtctatgagggagatactaagttagctccctactcaggcatagagtgcaaaggaaagccctggaatgaaggtgtaaatttgtaagccctctgtatgcagatggtgattgaagctatgagcatgcatgcagctttcttgagagatgatataagagaacagaaatggattcatccctgtgaaggccatcatttggtgaaatcattctccatctgggttgcacatgagagtcatgaggacagctttagaaatgctgatgcctgggttctagctacagaggttatgattttatcgttgttttggtctggtatgtgacccccgcatctgaaattgtaactgcttcccaagtgactctaatgagcagctaaggttgaaaaccctcacttcttagctgggaagtggaaaataaactgcaaaggaaacagaacatatcaggtagagaaatagagggaaatcaagtaagaaggagtggtcagagtgcctagggctgctgaggtccagcaataccagaactgaaagtgccgctggatttagcaaactgaaggtcgctggtgacatgagtgaggtcactcattatcatcttccgtggcctctcaaaggctgaaatgatgtggccatccaccctgctcaggctttataaagatgacacaggtggcatccaggtgtggggtttatgagtgcagtcaagggtgatggggacttattgctgctctgggtgtgtggagggcaatttgtctatatctatcaaaattataaatgtatgcatcatgtgtcttgataatcctacttctaagaataacacaatggcatatgcacaaggttattcactgaaacactgcttatataatagcagcaacagactggaaatggtgcaaacacccaacgtcagggcatacacaaccatcaagagaaatacagacacctgctatgtcctgccagggaatagtctccaagatacggtgtgtgaagacagacgagtgcaaaaacaggcagaatagcagtgttggaactcctgttacacggaagcggcccaaagacacccatttgcatgcatatctattttctctgcaaggacacttgaaacaggtgaaattggttacttcctgggacagacactaaatgtgaggtgactagggaagggaaagagagagagagttttcactgtatttgtgacctttcacccatatggctttcaaaccattgaaacctattgaaaataaaaactgatgagaatggtatttccctgagaacaggggagggggaggctgtattttggggtgtaaggaaagcagagtttttcagggaccacacctgttactttgtatcccaattcatttaagtgtgctgatagttttcattgtatttgttgtattatttgtttgaaatcaacaagattgcaagaactgggatgtgttatttagagtttatgctggaagactgattgttcatcaatgtcaaagatacactttagagataatatctcactcctgaagtccttattatttccagtagccaaactcaatttctgaagttgatataaagctcactgggctaggaagcaggagtctgagattgggtcttagttttatcaatagcgtactcggtggccttaggtaagttgcttcatctctcttcactttagtttcccgtccatgaggtgaggttggtaatccctggcttagctgattcccctaaactctaaggaacaaaggggaccacagatgtacttgtacttggtaaaatatagacacctacaaatgtgatgggtctgctatttttatcctattgctgcttgaactttgaaaatctatttgaatacatgcatacacacatgtatacacatgcatacatatatgcatatatatacacatacatgcatacctgcatagacatacatatatacacacaaacatatatgcataaaatacatatatacacacacacatacatgcaaacacatacacatatatacatacacacatacacacaagcatgcatgcacacacacacacctctccaagaaactgaagacatccacattttattacaggacaaagactgagcaattttccaaacctccactcacatgcccaggaaaaggcaaatggctatcttagctaagccagaactcttgcccggaaagctagcttggctaatttcctgagaagcccacagggaagaggcttgaggaacagcacctgtccaccagccaacaagattgatccctggcctcccttggcggggctggcaggacagtgtagcaaggcagctggccaaactctccccaaggctcgccgagcttttagctagtgatcaggtctgtaaagcctgacctttatcgtaggataaaagtaggctttgttcattcatttcatcttccctaaaggtaccattagcgatttattgatttttctttttagagaaaatcttaaagtttctttttaagacagagatttgagcctgtgcatctaaccctccccaacttccaccttcctgctggcatacaaaacagggaaagactgtgtcagtgctgaagctccggaggaaagagagccccttggcagaaacactgtagacttctgctgggccaagagctggggaaggcagactgcaaggaggacctaccttacataggagaccacgtttgcctggaaggcgagtggaggaaaacccaggggacgccactagtgcctcagacttaaagggagagctggactgcagatgacgatggacagaggggttgcctggggtgcacaggaatcccaccaatatgcacttatgcaaagtggctccaaactgcacccagtcaagatccaacagcagttattccattcccctcattgtcaaagtcctcaggaccatcccagttgatgggagatgaaggaacagagacctcatacactctcccctaccccctttcttattcccaccagtggcacaagagggttctaggtccccctcactcctttatcctgtcccactccatccttgatggaaggagtcttttagcagaaaaaaagtgaattaaataaagcccaaatgtagtgagagaaaggtgtgtctgtctacaggtattttactatgagaaaggtgaagatacaaggaggcaagatttgaggtgggagctgggaggaggaaggaaacccaagagaaagagatgctcagcagatctgggagaggagcccggcactgactgagggagttgctgaagtgcctcttgattccaggtgctttgctgctccctgacccgcatggtgggacccttcttggtgacagggaaagcctgcagccctcccagtcattgtcactgatggaataaatgcatagttctggaaataagtcctctaaaattctgctcaattgtggcaccatctactttttacctctgtactttcatttttaattccccaaaatgttttactataaattcttattagccaaaacatgctttaaggattgaaacaaacaaaaacctaaaatgacttatcgtctcctgcagaccaatatccagggtcaggctgggcacagtggctcacccctgtaatcccagcactttgggaggctgaggtgggaggaatgcttcaggtcagcagcttgagacatgcttgggcaacattgtgagaccctgcctctacaaaattaaaaaaaaatttcacgtgtgatggcacacatctgcagtcccagctacttggaaggctgaggtggaagcattgcttgagcccaggaggtggaggcagcagtgagccctgattgcactgctgtgctccagcctgctgtttttgaaaaaaaatcaaaaaacaaaaaacaaatccagggtcatgggctggacatggctggacatgggctggacatgggctggacacataggagcccactgatcggccttcctgtcgtgtcactgcccgtgacaccaaatggacactcatctccttcaagctctccacacccttgctccctcaggccccttcacaaatgccagctcagatgtcacagccttgaaggaccctgctcatcccgaccccaaggggcggaactcatctcgcccacccacctgctgctcatcactgagtcctcaccagtgtatgaccactgcccattagactgcgtagagtcagtgctcatcactgccacctccacagagtctttcccaggacccagctcaacgtttatggatggaggctgtgtttgaaaggtttccaggttgagtccccagacagccaggtatcacggtagccaaggacaggatgtgccagaaacggatgaagtcccgcccctgtgccaactctttcaattctggatgcagctctgcaactgaagctcccttatcatccccattgcacagggatgatgggaaccatgcggggtcagtttcactctgggaagtggtggagctggggctcgctctaaggggacagcagagctggggctcgctgtacgaggcagtggggctggggctggctgtaggaggtggtgaggctggagttcgctctagggggcaggggggctggggctcactctaggaggctgtggggctggagtttactctaggtggcagcagggctggggctcactctatggggcagtagggttgaggctggttctaggaggtggtggggctgaagttcgctctagggggtggtggggctgggcctggctctaggaggtgatggggctggggctcgctgtagggggcggcggggctggggctggctctagaaggtgatggggctggggctcgctctagggggcagcagggctggggctcgctgtagggggcggcggggctggggctcgctctaggaggtgatggggctggggctcgctctaggaggtgatggggctggggcttgctctagggggcagtggggttggggctcgctctagggggcgggggggctgggactcactctaggaggtgatgaagctggggtggaccctggcattctgactccagcactgtgtgtctaatgatcattagaaaagtttccatacttttttcgctttagaaaaatggtgctgtgtcacagcttcttcaagagtcaacagataagctgtatgtgccatcccctgtaaggctgggaaagagccattgctctccaggtcacaatggccagggagcctttgcccagaccctgaacgctgagcaaaggtcacgagtagggagttctctctggatcagatttttactccaagtaatctctcccagccttgcagtgtggtgtttctaagtacactccaaagtattgccaaagatgaggcagtcaaggaccagcactcacacagggccttaattactcaaagatctgtgtgtttactgaatgaagatatttatgccattctaagaaggtttacacaggaaaggtttacaaaaaaaagaaaaggaataatagtttgctttatgcaaaatcttaggcttaaagtggaattgactccaagattccctaggatatagaactctaatgccacctttagagcaagctttctctactatggagttttcgggacctgagctcacagtcctctcccttccttcctctcctgcttcttcaccctctccctctctctgttgcctccagggtcgtagggccattctgcattctgccctaacatctttctgctatctgggaaaagggcccatgcccagtgcttcagggcaatttccagctacctccaagcccagagaggtgctctcagcatggggcctccactcaccctgtggcatgactccacccacccacccactggagcattcctgccccccatattctaccccctggctgtgaaccttcataagaggagggagtgggggcacctactttgtgccctgccacaagattgggctggatgaaggccatgccatgaagaaaacatcagacaagccaaggagggtgcaggctcttgcatggatcacagagttcccagggcagtggagtgaggccggtgggcagtgtggacagtatgtgccccagagtccaggaaggcagccatcccattggcctggggcagggggaggaggatcaaacccctttgccaagaaggggatgatcataggcccttcccctgccccctgccctcactgctggctccctgtcagtcctcgagagggcacggcacagatgtgggtgctgcttctttcccgtgggtggtcttcattttttttttttttttggagaccgagtcttgctctgtcgcccaggctggagtgcagtggtgtgatctcggctcactgcaagctccgcctcctgggttcacgccattctcctgcctcagcctcccgagtagctgggactataggtgcctgccaccacgccccgctacttttttgtatttttagtagagacggggtttcaccgtgttaaccaggatgatctcgatctcctgacctcgtgatccacccgcctcggcctcccagagtgctgggattacaggcgtgagccaccatgcctggccagtggtcttcattttaacacagtgctgcaggacaggcatcctgggggaggacagggaggggcagagggtccctgtgcagttgaaacaactctcaccctaaatgttcttctctctcagtggatttccattgctttttcctgcccagcatccattattcccaccttttggaaataagatactatttttttctgtcagcttgtatagagcgtgagaggctgaccaaccttctggatgtgggtgtgggtgcagaatgcaggcctggccaagctgcacttcattctccaggacacagtgattggctcagaggcagcaagtgacccaagacccctcagccagaacaattacgggttcatttgcaggacagctgactgccctgggcaaggtgactttccttaatcgggattattaaatggctaggatatgaacttggagctgctggctctgacaagagggaattgagcttgaaatggagtcaacacaggataatagaatcagcagatggtgaacataagattcctgtaatgctgaatgtaatgatgacctccttggagaccctggatccagccttgcctgaaagccctttcttggactttttagttaagagggacaatatatgtcctttttagtttaaagcaatcccagttgattttctacagtttttctctgtgattcctgattaatacacttcctttggggagaaaatgacacagcactttatcctcctctcatctggagaatgtcccttcctcaaaggctctactcttctctcttgctcttttctgtttcttcaggactcatgggtggacagtgagttccctatcactgaaagaaggtatgtgatatggtttggctctgtccccacccaaatctcatcttgaattgtagttcccataatccccacatgttgtgggagggaccaggtggagataatcgaatcgtgggtgcagttatctccacgctgttctcatgaaagtgagtttacatgagatctgatggttttataaagggtttcccccttcacttggctctcattctctctcctgccgccctgtgaagaggtgcttctgccatgattgtaagtttcctgaggctccccgagccatgcagaactgtgagtcaattcaacctctttcctttataaattacccagtcttggttatttcttcatagcagcatgagaacagactaatacagtatttgatgatttgttgcctacctggtggcaatgtggtgaagggaaaggtgtttaactaaactctgcttttccttcccctctaatctaagaccttatatcagtatctaatgggaaccttcccatccgtcaaatgagagggcgatgaacaatcctaaatgatgggacacatttgctctgtgtcaagcactgtgctaagtattccatatgttcacttctttaaccccaaggcgctgaagggcaggggttgctgcccactccttgccaagatttaacagctgctggaggctgtatggcttggaggctgtggtgatgtgcagatcccatggtgtgagtgcaggctcttcactgctaggtgagttacgggacctggtggggcactggactggtgcgcactcctctccacttcctgtatggatagacacctgctatctgtgcctctccacctcctctccttccctctctttggctaagacctgggccttgatgggagaaaacaggttcagagcagtaggacctagggagagaaaacacgtgagcataaaataggagtgggaaggagagggctggtggctggggcagtagagggagaggttcccctttagaggttgtgagatggaggccctggtgggtcaggggttgtgggagatgtggaggagaagagatagaggacaagtgtgtgtgtgtgtgtgtgtgtgtgtgttataggttgggttccttttaatcacttttgggagaagttcaagactttaagttattattattactactactcttttttatttttagcccagatggtgtgtctctatagggactggaccacacgagtcaggaagactcatatcagagtttgattgcgtatttctccatctacccacccccgactcatccatcatcctctctccctctctcctccctccagttcatgggaagttagcatgagcattctgccagcagactatggagaacagtgcaggggggtgaaaatgaagagacagttaagagagcaacacacggggctaagaggccaagctgatctgctgggccttacacctgggtgtatcagtggaagtgtgatgtggacagagcacccgagcttctctccagcttaggagcagtccgcgttgggggaaagggagggggttgtttttgttggctttggctgtctcccagcccattagggatcagggtctatgctgtgtgctgtgtgatgctctgagggctgccttagctccgggtgaaagaggatatctgttagttttggaagtaccagtgtcaggcagctgagtgttttcggctttcaaagatgatgccctctgtgctcctggagccattctgctaatggaatgtggggcctgttctgagggattaagccaaccctgtggtcagagccaggggtcactgggtgttctgtctcctggaagtgaaaggaggtggtttcacaccaatgattaggaaagcagtgagcatcagagtgggtctgattgcagaagctctgtgtttgcaggagaatccaggctcctggggaccggaggttagtcctggccataagtctatcctggaaggatagacttgaagcaggggacagtcacagtctaaatggctttggggcacatggttggtactgggtaaatacctgctgacttgaattaaaagagagttttgtgatttgactccttaaaataatgtttaaatgacagatgcctccaaggcaaagcaacagaagctgagattatgaacaaggtcccagcacctgtgtcctctgtgaccgatggttcaggtgttgctgctaccaggaagtgatggagagagtatctgggctgctctgggtaaatcccatcctttctctgggcctcctctttctgatctgtagaatgagataataagagtatctcccttacggggccattaggagaagtgcgtcatggccgagggcactgcatggcccctgctaagctggcaggtgtggcccgggtctcctgcttccagttctgagaattccaactctgaggctgcttgcctaacaaaagcttgtgtcccggcttgcacagaatcacattgagggttccactttgttcctaatgaggtaaatataacagcaggttccagtgaaacaatttgtatgcccatttgaagcaagacttcagctctgccatgctcatttccaatacatttgttactcttacctattcaatagcattcagatcattcaatgtctaatggaaaccttcagtctccctaccctgtcctgttcttacttcttttaccctaattcaattttctctgtttcatcttccctgatgtttcagaaacatcatgattcaggccacacacacataaggagcatccatcagggctatgacccctccagccctcacgaaggtgctatatggttcccagcagtgggggagacaggcacactgttaccaggttgccctgcgtgagccagtgagacacgggtgctgatggccatgaggtggaccgccaggacccaggtcccactctggaagccaggttcatcggctcttcactcttactgctgggaactgcacggggccttgggaagccctctttttccttctgaccaccggagggcagaaaacttgcagggctgagctgtccatggtgtcacaggctctgtccactgagaccaggtgtgagaacaagaaatggacactatctaaaagggagggagtgggaatgttctgtgtgtacacacaggagccctggaggagctcggtccatgcctggctggggtaacccgggtaggcagtctggaggagagggcttgagctcgtgttgaccaatggataagagttctacaggcaagcacaaggaagggaggacaattgaaagagggacagcaggaccagaggcatggaggtgcactgtgcatggtgttattgtgaagaagaggtggaaaggagagcatccaggtggcccccatgcaccaggggctgggacagtttcaaggcaattgctgaaatctcacgatagtcctgagagtgggtgttttgcatgtgacgaccatgaagctcagaaaggtaaacctatgggctgatgtcccccagccggactcttgagccctgggtgtctgattccaaggccacactcctcctattgcacaggtgtgctttcaaccagacactgccttcccaactccccctggagggaaggcttgagcgctctggtttacacagggcccgctggatttctgtcaatagggaacgtgccgttgaagttgtaccagacctgggagagcctgcagcctcgcctgcaagcacagcctccaattacgccagtgcatctcctgctcatcaattccccttggtggagtagggccatgtgttctttgtttggatctaaatcctgctgctctattgattactataattcagccctaattggacttctgcaaagcacaggcacagatgacagcaggcctccaggcagcgcagcatccattattaatatgatggtgttggcctttcccctgcactctgccttcacctcgaggagtctggaaaacagacctcccgagcaacgtgccttccctgtgaagtcatctcctcaaaatatttgtttcctcttggagaagaggtgtgcaaaccgcacagctagcaaacaatgctttaattgcctttctgccagcccagggaaacagtctatgagcccctccttccaagttggggaggacactcagaccccctcgcaaggaagggactgacctttgtgagtagccaggctgcaggagagctgcaggcagactcgggggccagcctaaattcagagaagccagtgaggcagagaccagaatttgtacctggctgcccatgagaatggcccaagcagaagggtcacattgggccaagcactggagatggccaagtggcagcagagagtggagctgtgttccgtgggctcaagcagaacagattctcattattggaacaggcctaggtagccttgctacctaacaagaacttgggcacaagtgaagagtttcatagcctgctgaggagtgaaatgtcagcacatttgttcagctgaccgcagtgagcagagcgcccaggtggcagctctggttagcggactctggcaaatggtatgcccttccaacatgggattgagtatttgtaggatgtcagagatgggaagagctatgcaatcgtcttggccagccactctgtttatagatgggcaaggtaaagctgagatcagaaaaggaagctacctggggtcatgcttttccattctccagacatttggtctccttccctaatcgggggaaagtcaggtgaccaccacggatctggtcagacagggcccagggcagctatatgagctgctcagattctgagaggacaggtcagggctgggtgtagactgagccaagcacctagcctggaggttgatttttctaaagccaagtcactgactctttgtgaacagtggcaggcagtcaaagtccacagtgcacccacacatcacttagatcattccacaaaccttacttgtgggattagtctggcgggctgtgggataactccaggcatggctgacaaaaaccctgccctcctgctgcttatgggaagacagactgtaaacaagtcagcaaacatacagacaagggcttcaggtcacccaaaggctggaaagcaatggcactgcacggggaacatgaggaggagtggccggaggatgagctttgcccatcattaacagtgacatttccattccctgggctgccccctgctgcctaaggggctcactgcaggggcctgcacttggcccttattctgcaagttgttctttgtgggagaatggagttgagatcaggcatgtcctgcagcagtctccacccctatctagccagccacaggagtctaccattccctctcctgctctgcaagtcctagagtttctcttgcagtggacacaggtgttccttaggagcacaggccatgccaggtgtttctgcctgtccttagtgctttaggaacaccctatgagtgaaaacatggtcatagggaaggaacacagtgctgggtggagatggagactgacagctttgtctacccagctctacaaaacgctgggaatagctatccctgggaaccttaccagggggctgggagctggtgcattccctaccagaacaggcagcctcattagctcccatctgttcacacccaccccccaccaggagacaggactgctgtctcctacatctacacggctgggcccctggctgctgcagtgggacctggtgggagccgatgtcttctttgcgcctttctcctcttatacgtctctgtcccctctccttctggagaagaaggctgccaggacctgtgatcacagccaaggggtcagtcccaatctcagggcaaaaatgtgaggacaggcaggagtagccctccttcctggggagcataggtggggtggcatgcatgtaaaatacatgacccttgcctgtctcttccgcatgtctgcaccttgctttcagtcaacttccttgtgtatctttgcactgtgatcccaactgttatgttagtatgaaatctcaatcacttgtggagaagatgagcaactgcctccttctagttgtgctttgttggggaggaacagagctgaggcctgagggagagcagggaaagaagtaagggccttctgccagtctcatggcacctgaaacaagcaccctcactctaccaccagccactcctgccgcctgctccatcatctttccattcaccgttgaaagcctcagtcctccctgtgttttatttgcctctgtgttttatttgcctctgtgtgccttgaaaaacagagcagtccgtgtactactgagtgactgtgaagatcagtgagggtaggtaaagcccaaaggacaatgctggcaggtgagtgctggtcaaggtggccaactcccctgtattagtccattttcacactgctaattaaagacatacccaaaactgggcaacttacaaaagaacaaggtttaatggacttacagttccacatggctggggaggcctcacaatcatggcagaaggtgaaaggcacatctcacatggcagcagacaagagaagagaacttgtgcagggaaactcacctttttaaaattatttatttatttttttgagacagagtctcactctgtctcccaggttggagtgcagtggtgccatctcggcttactgcaagctccacctcccgggttcatgccattctcctgcctcagtctcctgaatagctggaactacaggcacccaccaccatgccctgctaattttttgtattttagtagagacggggtttcactgtgttagccaggatggtctcgatcccctgacctcgtgatccacccatcttggcctcccaaagtgctgggattacaggtgtgagccaccgcacctggccggaaactcacctttttaaaaccatcagatctcatgagacttattcactataaggagagcagcacgggaaagacctgcccccatgattcaattacctcccaccaggtcccttccacaacacatggaaattcaagatgagatttgggtggggacacagccaaaccatatcattccatctctggcccctcccaaatctcatgtcctcacatttcaaatccaatcatgccttcccaacagtcccccaaagtcttaattcatttcagcattaactcaaaagtccatagcccaaagtcttatctgagacaaggcaagtcccttctgcctgtgagcctgtaaaatcaaaagcaatttagttacttcctagatataatgagggtacaggcattgggtaaagacagccattccaaatgggataaatttgccaaaagaaaggctcaggccccatgcaagtctgaaatctagtggggcagtcaaatcttaaagctccaaaatgatctcttttgactccatgtctcacatccaggtcatgctgatgcaagaggtgggttcccatggtcttaggcagctcttcctttgtagctttgtagggcacagcctctcacctggcggctttcacaggctgctgttgagtgtctgcagcttttccaggcgaatggtgtgagctgtcactggatctaccattctggggtttggaggacagtggccctcttctcagagccccactaagcagtgccccagtagggactctgtctgggggctctgaccccacatttctcttccacactgccctagcagaagttctctatgagggcctcacccctacagcaaacttctgcctggatatccagatgtttttatacatcctctgaaatcaagggagaggttcccaaacctcaattcttgacttctgtgtacccacaggctcaacaccaaccacatggaagctgctaaggcttggggcttgcactcactgaagccatggcctgagctgtaccttggccccttttcgtcacaactggagcagctgggacggagggcaccaagtccctagactgcacacagcatggggaccctgtgcccaacccactaaaccagcttttcctcctacaccttcacctctggacctgtgatgggaggggctgccacaaaagtctctgacataccctggagacattttccccattgtcttggtgattaacatttggcaaactgttatgtatgcaaatttctgcagccagcttgaatgtctcctcagaaaatgggtttttcttttctactgcatcgtcaagctgcaaattttctgaaccgtttcactgtttcccttttaaaactgaatgcttttaacagcacctaagtcacctcttgaatgctttgatgcttagaaatttcttcctccagataccctaaatcttctctctcaggttcaaagtcccacaaatctctagggcagaggcaaaatgctgcaagtctctgctaaaacataacaagagtcacctttgctccaatttccaacaagttcctcatctccatctgagaccacctcagcctggaccttattgttcatatcactaccagcattttttgtcaaagccatgcaagtctctaggaagttccaaactttcccacattttcctgtcttcatctgagtcctccaaactgtttcaacctctgcctgttacccagttccaaagccaattccacatttttgggtatcttttcagcaatgccccattctactggtatgaatttactgtattagtctgttttcatgctgctgataaagacatacttgagactgggcaatttacaaaagaaaaaggtttaatggacttacagttccacatggctgaggaggcctcacaatcatggtggagggtgaaagacacatctcacattgtagcagacaagagaagagagcttgtgcagggaaactttttaaaacaatcaggtctcttgagaatcattcactatcacgagaacagcatgggaaagacctccccgcatgattcatttacctcccaccagatccctcctacaacacatgggaattcaagatgagatttgaaggaggacacagccaaaccatatcatccactgctatagcaagcacagaataaaaagcttttgtttatttccacagtcctggttcatccctgccctgctcctcacctagaaagatgagccctagaacaatgcccattctttctcttgcctgccatgcaattctcacctcagcaggtaagtgggagtccccagtggtgccagacctcctagatgagccatctggagatggacatgcaaccttctgtggacacactgtagagtgctgcatggcctgaaaccccctgcctggggagggccaggttagaatgcaggacataggaaaaggaagagggtggcaagaagaggaggggcagaacttgagtttgaaaggcccaggcgtgacacaggggtggcatctaacccaggccttgaaggatgaattagaaaaaactaaggaaggtttggggccagtgggagtgaggcataagacagaccaaaagaaatgcacagaggcggaaaattctgaaggaaacatgactatttgtagctcagagctattcctgcttccctgtgggaccctgaatgccggtagttcaaaagcactttccaacgaatgcagattaaaaagacttaaacctctgtttcccttttctccatatacataaaatgataaacacccctgggacggctaggatttatataggcagattttttgaaagtttgtcttatatatctggactatggcttataaatcaaatttggttctctttgctggagagtaaattatttatccaaggcagagcaccaggcgatagaaggagaggcacagagaagacactgttttccagaagtcatttatattccccaagatgaggaagtgtcgggggtggaagtttctgagttacagattctggcgttccttcttgattcgtgtgctctctgctggtagccatggactcctgaaattggctttctgttgaagacatcatttgtggaattcaaatcagtgttttgcatttgggtccagcaccctgggtggatggctgcctgaattgagcagtgaacatattcagctggggaataaggggaccatcctgcgagtccatcaggctgcactgagttcagctccaccatcactctccctgggatatcaagcacacttagaacctcgctgggcttcagtctccttatagctggagccagagagtaacatctgccccttggggtctttgcagggttgaatgtgactgcatcgcacacagagcaagtaataataataagggagctcaaccccaatgccctacctaagagtcatcccagtgggagttgtccaaatgtgctccaggaggcttccctgctccagaaccccaagggaggtctgtgaggaggtgaaaaatgtctacacttttagtcaaatctcttaaggagaaaaaccactggttttatttcttttctctttttgtcattacaatttccaaggatcgagtgtgagtgttcatgtatgcagggccacgatgccatgctgggctggacccaggaggtgcctctctttctctgttatcaccaagcaccacacagaaatgtccttccaccagacaggcactcaggaagcatgggctgatagatacactttaggaatccagcaaagaactgtgagatctacactctaaaaatagaactatctgctctcaaaatttactatgggatgacatcctgggagctacccatcactgtccccataaacctagtgccccaaggtcccatgaacttcaggtcaccagaattatttttctctgaatttgacatttaggagaaagtaacggctgatagggagcagtgctgggttcgcaaggcctggaacatccctcctgggggctgcctctgccccacagacacctcccaggtggtcaccagcttctgcagctgcctcttgcatggggtggagccatgctcagagctaaaatactcagtcgctgctggtcttcaaaatccaaggacagttccgttttatttaacaaactagatttcctgaggcagaaaggtagacttgtcttttccagaaataatgctgaaagtgttaaaataaaaataattatttggaagcccaagttgattccaaaattaatctaaaataattcattccctgagcattttggtttattgaggttttacagcctcatgcaccaagtatttccatagtgccactgtgggcttagcactcccaccacaacaccaggcaggcagggcgggcctgcggaggagcatttgctatgtgctcagaggtctggaagggtggctgtgacagtgtggaacccagggacagagctgtgcccaggatgaggaaatgcagaagcaccttccagctgcggaagagcaaggggaaagcggagggttgagctgcatcccccactaaagacatgtggaagtcctcaccccagtgcctcctgatgtgatctgatttggaacagagtctttacagagataagttaaaatgaagtcattagggtgggccctagtccaatatccatataaaaaggagaaacgtggacccacagatagacacatacagagggaagagaacacaaggacacgcaagggaggaaggccatgggaagacaacacaaggacatgcagggggaggacagccacagggagatgatgtgaggactcacagtgggaggatggccatgggaagatgacatgaggacacgcagggggcagatggccatgggaagaggacatgaggacatgcagggggagcgcaggcacaggaagaaggcacgaggacatgcaggggatgatggccatgggaagatgacgtgaggacacacggggagaacaaccatgtgaagaggacatgaggacatgtgggggaagatggccaaaggaatatgatatgaggacacacggggaagatggccacgggaagatgatgtgaggatacatgggggaggacagccacaggaagaggacatgagaacacacacagggacgatggccacaggaagaggatataaagacatggagggggaggatggccacgggaagaccacgtgaagacatgcaggaggagacagccatgtgaagacgatttgaagacatgcaggggagatggccacaggaagatgatgtgaggacacacgggggtgggggcatggccatgggaagaccacatgaggacacacaaggggaggatgtctgcgggaagatgacataaggacacacagggggaggacatccatgggaagatgacatgagggcacgtggcggaggacgtccatgggaagatgacatgaggacacgcaggcagaggacgtccatgggaagatgacatgaggacacacagaggaaggacgtccgtgggaagatgacatgaggacatgcagggggaggacatccatgggaagatgatgtcaagatatgcagggggaggattgccaaaggaagatatgatgtgaggccctgcagggggaagatgtccatgagaagaccacgtgaggaaaaacggggaacacgtccatgggaagacaatgtgatgacatgcagtgggaggacagccagggaagatgatgttagaacacacacagggacgatggccacaggaagaggacatgaagacccacagcgggaagacggccatgagaagaccatgtgaggacgtgcagggggaggacagccacgtgaagacgatttgaagacacatatggggagatggccatgggaagatatgtgaggacacgcagcagtggggatggccatgggaagaccacatgaggacacacagtgggaggacatccacgggaagatgacgtgagaacacacaggggatgacatccatgggaagatgatgtaaagacacacagggggaggacgtccatgggaagatgatgtgaagacatgcgttgggggatggccacaggaagactacatgaggccacacagggggaagacgtccatgagaagatcacgtgaggaaatagagggggagacagtcatggaaagatgatgtgagaacacgcaaggggatgacttccatgggaagagatgatgtaaagacacacgggggaggaagtccatgggaagatgatgtgaagacatgcagggccacaggaagatgacatgaggccactcagggggaaggcgtccatgagaagaccacatgaggaaatagagggggagatggccatgggaaggtgatgtgaggacaagcaggaggaggatgtccttgggaagatgatgtgaagacacacaggggatggccctgtgacccagaaatgccaaggactgccggcaacaccagaagctgtaagaggcaaggagggattctcccctagagccagcagagagatggccaaccttttgaattcagacttctacctccaggcctgggagaccatctgttacagctgttttgggccaccagtatttgccactttgttatgacaggctcaggaaactaacgcaaggagcatcttagcttttgttcctccagaagctcacccagagaacaggatgcacacacaggtagatttgaggggcaggactccaggaaacactggtggaggagaaggggaatgaggcaaggaagggatggtagcaggcagacgctgtgctgtccagccaggggcctctgcagacaatgacacttaatgcccatggggaaactgggagttagtgtagaacatgcactgcagctatctgactcaatgttagggagctagggtatttatacaccaatgtccatgagctgagggctgctgttaccagggcagccctgataaaaataactgggaaagtttatttttcgtattgttttcctttattccttcatttacaggcacagctacttaaagaaaccagggactatgccagaacttcttgacctctggccaggtaccagaggaagataaaacctcacaaactggtgcaaactggaacagaggatccctggttgcctttagatcattaagatattatggtgctaaaattccctcccttaaaaaaaactctgccatcttttatacatgtgatgtatgaagatgtatgtgtatgaattgcacctgcccatctggaatctcgcatgctcaagttcctctcccagcctgtaaccagtctttaaaaaccccatgtgtcctaggcttcagggagaagatgcatttagaatatcagcttgccatccccatttctagccagtgaacagaaactggttgccttttccaattagactttttttaaatgaccaatacaaagtggaaaaagaactctgtttactggtaacactactgcttgaggataggggtggtgttaattctctggcacttggtgtaggtagcaaacttgctctggagaccagagaaagccctaggaagggcctgggctggcaggaaagccctcaggcagggcctgggaggcagtagggacaagaggcatggatggacactgacagtgctgcttcagggaacattgggaagggggagagaaaaaggcaggaaagttacctgtgaagccagactgccaaacttggatgtcaggctagagtctggacttcattccttagacagtagggaggtgataaaggtttctgagtggaggaatgaccagattagagctcagcttttggaaaatgaatttggcagggagaagaaaaaacagaacactgacagttaattgtgcttgcctgacagtgctcagtgagaaagacaggactaaagtgacatggcaaggaggagaaggcagtaggaaatgctggctaactgccccataagccacagagtcctggttcatagactgtcaaggaaactgagggtcagggtgtggagaagggtggctccagggcacctgggataagcaggtttgggagaagaactgtccaccatatccttcactccctgtcctgagtccacatttcagaccaaatgagaaacataagccactgggaattgagcagatggcttttccaaagcttccacagttttcattccatccaaatcaaacgtggattggaagccacagggtttgtaaatgccactgtgccatttgaagctaggatctcgtttgccaacttgcagcctgcacttcagatgcttcaaaagagagggttatccacactgacttataaataaatgaagaaactaaataatgcattccatcctaatatggctctcatttccttgatgattatgtaaaaaatcactaacctaaattgcccaatagatagaagaccctcaaaaggaaacccgagggagaactggcctttatccattccatataaatcacagagatgctgcttttcctcacatctgaggagaggggcctccaggctggggctgcacagggcggtagatgcttcctcctcctcagcttcctgactgcctgagaagagtcagcctctgtgtaggggctggatctgtcagttcctgggttaccaacaagcccggtgctcagggagggagtagggacagtgggttctcagaagcagttctgagagaatcccgttgtggacttagcaggctcaggcaaaagagaggattaactctgcttgggccaaaccatgcgatgcatctgcttgcattgggaggaagatggtcaccaggagctggcaggactgttgttcagaaagcaatgccccaaagatgcatttactcattctactgtcaaataaaggaagggcaggaagtttttcagagggaagggagcctgagggtcctcacttcccaaatgcctggcatttactcatttcatcttcacagtgagtcctactgccaccactgtagatgagaaaactgagtttcagaggtggagcaagcagccaacataacacatttgttaaacagctgggttgggacctcatctctggactcctacgcacaccctccatccacactgtaagctgctggggaggaggttaacagcacttcccactctgaagttgcctttaaaaaaattatggagggaggttccaagatggctgaataggaacagctcccgtctacggctcccagcatgagcgatgcagaagatgggtgatttccgcatttccaactgaggtacagggttcatctcactggggcttgtcagacagtgggtgcagcccatgaagcacaagccaaagcagggcgggacaccacctcacctgggaagtgcaaggggtcagggaattccctttgctagccaagggaagctgtgaccaatggtacctggaaaattgggacactcccaccctaatactgtgcttttccaatggtcttagcaaacagcacaccaggagattatatcccatgcatggttcagagggtcccatgcccgtggagcctcactcactgctagcacagcagtctaagatcgaactgcaaggcagcagcaaggctggggaaggggcgtctaccattgctgaggcttgagtaggtaaacaaagtggccaggaagctcgaaatgggtggagctcacagcagctcaaggaggcctgcctgcctttgtagattccacctctgggggcaggtcatagctgaagaaaaggcaacagaaacttctgcagactaaacgtccctgtctgacagctttgaagagagtagtggtcctcccagcacagagtttgagatatgagaatggacagtctgcctcctcaagtgggtccctgacccccgagtagcctaactgggaggcacctcccagtaggggccaactgacacctcatacagccaggtgcccctctgggatgacgcttccagaggaatgatcaggcagcaacatttgccattctgcaatatttgctgttgttctgcagcctctgctggtgacacccaggtaaacagggtctggagtggacctccagcaaactccaacagacctgcagatgagggtcctgactgttagaaggaaaactaacaaacagaaaggacatccacaccaaaaccccatctgtacatcaccatcatcaaagaccaaaggtagataaaaccacaaagatggagagaaaccagagaagaaaagctgaaaattctaaaaatcagagcactcttctcctccaaaggaatgcagctcctcaccagcaatggaacaaagctgaatggagaatgactttgacgagttgagagaagaaggcttcagacgattggtaataacaaacttctctgagctaaaggaggatgtttgaacccattgcaaagaagctaaacaccttgaaaaaagattagacaaacggctaactagaatagacagtgtagagaagatcttaaatgacctgatggagctgaaaaccacggcacaagaaccacatgatgcatgcacaagcttcagtagatgatacgaccaagtggaagaaagggtatcagtgattgaagatcaaatgaatgaaatgaagcaggaagagaagtttagagaaaaaaaaaagtaaaaagaaatgagcaaagcctccaagaaatacgggactatgtgaaaagaccaaatctacatcagattggtgtacctgaaagtgacagggagaaaggaaccaagttggaaaacactattcaggatattatccaggagaacttccccaacctagtgaggcaggccaacattcacattcaggaaatacagagaatgccacaaagatactacttgagaagagcaactccaagacacataattgtcagtcaccaaagttgaaatgaaggaaaaaatattaagggcagccagagagaaaggtcgggttacccacaaagggaagcccatcagactaacagcggatctctcggcagaaactctacaagccagaagacagtgggggccaatatgcaacattcttaaagaaaagaattttcaacccagaatttcatatccagcgaagctaagcttcataagtgagggagaaataaaatcctttacagacgacatgagcaaatgctgagagattttgtcacccccaggcctgccctaaaagagctcctgaaggaagcactaaacatggaaaggaacaaccagtaccagccactgcaaaaacatgacaaattgtaaagaccattaatgctaggaagaaactaacaagcaaaattaccagctaacatcataatgacaggatcaaattcacacataacaatattaaccttaaatgtaaatgggctaaatgccccaattaaaagacacagactggcaaattggataaagagtcaagacccatcagtgtgccatattcaggagacccatctcaagtgtggagacacacataggctcaaaataaagggatggaggaagatctaccaagcaaatggaaaacaaaaaaaagcagaggttgcaatcctagtctctgataaaacagactttaaaccaacaaagatcaaagaggacaaagaaggccattacataatggtaaagggatcaattcaacaaaaagagctaactatcctaaatatatatgcacccaatacaggagcacccagattcataaagcaaggccctagagacctagaaagagacttagactcccacacaataataatgggagactttaacaccccactgtcaacattagacagatcaacaatacagaaagttaacaaggatatccaggaattgaactcagctctgaaccaagatgacctagtagacatctacagaactctccaccccaaatcaacagaatatacattcttctcagcaccatatcacacttattccaaaactgacaacatagttggaagaactcctcagcaaatgtaaaagaacagaaattataacaaactgtctctcagaccacagtgcaatcaaactagaactcaggattaagaaactcactcaaaaccactcaaccacatggaaactgaacaacttgttcctgaatgactactgggtacataacataatgaaggcagaaataaagatgttctttaaaccaatgagaacaaagacacatcataccagaatctctgggacacatttaaagcagtgtgtagagggaaatttatagcactaaatgcccacaagagaaagcaggaaagatctaaaatgaataccctaacatcacaattaaaagaactagagaagcaagagcaaacacattaaaatctagcagaaggcaagaaataactaagatcagagcagaactgaaggagatagagacacaaaaaaaagcccttcaaaaaatcaatgaatccaggagatggtttttgaaaagatcaacaaaattgatagacggctagcaagactaatacagaagaaaagagagaagaatcaaatagatgcaataaaaaatgataaaggggatatcaccaccaatcccacagaaatacaaactaccatcagagaatactataaacacctctatgcccataaactagaaaatctagaagaaatggataaattcctggacacatatactctcccaagactaaaccaggaagaacttgaatccccgaatagaccaataacagactctgaaattgaggcaatacttgagagcctaccaaccaaaaaaggtccaggaccagatggattcacagtcaaattctaccagaggtacaaagaggagttggtaccattctgtctgaaactattccgatcaatagaaaaagagggactcctccctaactcattttatgaggccagcatcatcctgataccaaagctgggcagagacacaacaaaaaaagagaattttagaccaatatccctgatgaacattgatgcaaaaatcctcaataaaatactggcaaagagaatccagcagcacatcaaaaagcttatccaccacgatcaagtcggcttcatccctgggatgcaaggctggttcaacataggcaaatcaataaaagtaatccgtcatagaaacacaaccaagtacaaaaaccacatgattatctcaacagatgcagaaaaggcctttgacaaaattcaacagcacttcatgctgaaaactctcaataacctaggtattgatgggctgtatctcaaaataacaagagccacttatgacaaaccgacagccaatatcatactgaatgggcaataactggaagtattccctttgaaaacaggcataagacagggatgccctctctcatcactcctattcaacatagtgttggaagttctggccagggcaatcagacaggagaaagaaataaagggtattcaattaggaaaagaggaagccaaattgtccctgtttgcagatgacatgattgtatatttagaaaactccattgtctcagcccaaaatctccttaagctgataagcaacttcagcaaagtctcaggatacaaaatcaatgtgcaaaaattacaagcattctcatacaccaataacagacaaacagagagccaaatcatgagtgaactcccattcgcaattgcttcaaagagaataaaatacctaggaatccaacttacaagggatgtgaaggacttcttcaaggcgaactacaaaccactgctcaatgaaataaaaaaaggacacaaacaaatggaagaacaatccatgctcgtggataggaagaataaatattgtgaaaacggccatactgcccaaggtaatttatagattcaatgccatccctatcaagctaccaatgcctttcttcacagaattggaaaaaactaatttaaagttcatatggaaccaaaaaagagaccgtattgccaagacaatcctaagccaaaagaacaaagctggaggcatcacactacccgacttcaaactatactacaaggctacagtaaccaaaacagcatggtactggtaccaaaacagacatatagaccaatggaacagaacagagccctcagaaacaataccacacatctacaaccatctgaattttgacaaacctgacaaaaacaagaaatggggaaaggattccctatttaataaatggtgctgggaaaactggctagccatatgtagaaagctgaaactggatcccttccttacaccttatacaaaaattaattcaaggtggattaaacacttaaatgttagacctaaaaccataaaaatcctagaagaaaacctaggcaataccattcaggacataggcatgggcaaggacttcatgactaaaacaccaaaagcaatagcaacaaaaccaaaattgacaaatgggatctaattaaactaaagagcttccacacagcaaaagaaactaccatcagagtgaacagacaacctacagaatgggagaaaatttttgcaatctacccatctgacaaagggctaatatccagaatctacaaagaacttaaacaaatttacaagagaaaatcaaacaaccccatcaaaaagtgggcaaaggatatgaacagacacttatcaaaagaatatatttatgcagccaaaagacacatgaaaaaatgctcatcatcactggacatcagagaaatgcaaatcaaaaccacagtgagataccatctcacaccagttaacaatggtgatcattaaaaagtcaggaaacaacaggtgctggagaggatgtggagaaatgggaacacttttacactgttggtgggagtgtaaactagttcgaccattgtggaagacagtgtggcaattcctcaaggatctagaactagaaataccatttgacccagccatcccattactgggtatatacccaagggattataaatcatgctgctataaagacacatgcacgtgtatgtttattgtggtactattcacaatagcaaagacttggaaccaacccaaatgtccatcaatgatagactgcattaagaaaatgtcgcacatatacaccaggaatactatgcagccataaaaaatgatgagttcatgtccttttgtagggtcatggatgaagctgaaaaccattattctcagcaaactatcacaaggacagaaaaccaaacactgcatgttctcactcataggtgggaattgaacaatgagaacacttggacacagggtggggaacatcacacaccggagcctgtcatggggtggggggagaggggagggctagcattaggagatataccttatgtaaatgacgagttaatgggtgcagcacaccaacatggcacatgtatacatatgtaatagacctgaactttgtgcacatttaccctagaacttaaagtataataaaaaaaaaaaaaagctgaagatgattaaaaatgataacaaaataggcaaaaaaaattatgatagaaagaaaatctgacgtaattgactccatctcacttctaccaggctgaattgcttttgctcattcttgtgtggaggccataatagtccttttcttgattttctccctgccttgttcaaaggttgaaactatatttgtaaagactgatcaaaggccagaaggtcagaattctggtagaggcctgaactttgctaaagaatgggcacaattaaacaataatcagccattgttggctcagcttaattttactgccccagagtcacataacagaggtcacaagatttgtaacttccccagctgctcctacaagtaacatcactattgtgaggcctaaaggactggtctttgagatatttttctgatttagcattttgctaagagttaccacctgggcctgtgaccaacaccaatggatagactcaactggccctgtgacccttgggtaagaaatgactcagccacagtttccacacctcagtgactttatccccagctaatcaattgtttcagtttcccagtcccctccccagcaaagaacccataaaaaccctagcctctgaattctcagggaagtggatttgagaatctctcccatctccttgtgtgccttccctgtgattattaaactctttctctgctgcaacacctgctgtctcagtgtattggcttttctgagcaattgacaagaagcacccatggggctctgacaacatcatggtagcagcctgctccttcaactgctattgagtggaaaggaaaccctggtgtccctcccccttccccaggaaggactgggcactagcccctgagggttgatggtggatcattattcattcattaattcattcattctcttatcagcaccttccaatatccagtcaacaaacaagctgagaaggcccaggtgatggaaacctcctcacagaggctgaggaagggagatggatgagccccaaagcacactaccaggttacagaataagtgctgtggcaccaaaacaacatggtggcatggtcacaagagtgaaccccacactcaaagccctgggctggagtccagccctcaccaactacaggactcagtttcctcatctataagatgggggtgataaaaatgcccattttatggagtgtggtgggaggactagaggagatgtgaaggtgtttagaaaatctctggcatgtggtggctgtctcatgagggactagccatggtcactaagtatcactgtcatgagatgagaacatcttcttgggtttgcagatctgctgtgagggcactggcctgggtttgccacatacccctctaggtattcacaggcatttaaatgcctttagccttcacagtgacggtcaccctttaagaaggacacacattagcatctgtctttgacagaggaagaaccagtgcactgacgggctaagtgacttgtacaggacacagtgctaacacaggggtgagcctgaatccatcccagacagtggcctccagcaactgctttcccaaccactgcaattccactgccaaagaaaggaagggcaggaagtctttcagaggggagggagcctgaaagtcctcacctaccgaatgcctggcatttactcatttcatattctcagtaagtcctactgccctcactgtaggtgaggaagctgaggttcataggtgaagcaagcagccaaagtcacatatctgttaaacagctgggttgggacctcatctctggactcccctgcacaccctcagtccacacttcaagccacattctccatctagcctcgccaacaggcctcaggacctacagctatgaccatcctgttcacagtatttgctttgttttgattttaatgcttctctgaaaggatgatgttcacctttcttgacctcagagaagccagagaggagatagtcatctccgtggatggcaaaggcccatgtgttgtgagtggcagccaccccctagctggaggtcaggtccacatagaatccccattgtaagcacaccacagtgatatggctacctgagtaaatcctgtggggaagtctgtggatgcaaagactcacctgtaaagcaaacggtcctgcttccattcaccatgttcatcttctgataatgtaagaagcacatcgtatgtgtgatgtgcgtggtgactcacaccataacagtggctaccacttattgagaatttacaaatgtcagcagctatcctaataatgtcacatgttatctcatttatctgggacaacagctctatcaggtaagttctgatgttatcatcattttccaggtgctacctcaatcgagaaggcagggcagggacactccaagtgtgctccctggatcgatagcatcagtgtcacctaggaatattgcagaaaggcacattcttagtctcagatcaggtctgttgtatcagagcctctgggcagcaccccgccatctgtgctttcataagccctccaagggattcttttttttatgttagttatttattttagattcagggggtacgtgtgcaggtttgttacacgagtatattgcattatgacgaggtttgggcttctaatgatcccaccacccaagtggtgaacacagtgctgatacatagtttttccatacttgcccccctccttccctcctcggttttgaaatcccgagggtttattgctccagtctttgtgtccatgtgtatccaatatttagctcacttttttttttagatggagtcttgctctgtcgcccaggctggagtgcagtggcgcagtctcggctcactgcaacttctaccttccaggttcaagcaattctcttgcctcagcctcccaagtagcagagattacaggtgcccaccaccacgcccagctaatttttgtatttttagtagagacagggtttcaccatgttggccaggctgctcttgaactcctgacctcaggtgatccacctgcctcggcctcccaaagttctggcattacaggcgtgtgccaccatgcccagccccgtttagctcacttttaagtgagaacatgcagcattcagttttctatttctgcatttcttcactttaggataatggcctctagctgcatctatgttgctacaaaggggttttgttcatttttaatagctacacctgcaggtgagtatgatgtgttaaagtttgagatcaaccagactagggataacaaaagacctcaagatctcaatggcttacatcaggggctgtcaaactatggccaaaggccaaacccagcccactgctagtttttgtaaatgaagtcttattggaacacagccatgtccattggtttgcagtgctgcctgtgactgctttgcagatacagaggcagagttgggtaagtttgacagagaccacatgacctacaaaccctaaaatattttctctctggtcttttttcaaccctggcttcgagcaacaaaggtcatgtctcggatccactgcaggtctatggaggccagttgtggctctacattctgtctctctttctgtcccaggctgcagtggcaggctctgcctggggctttgtagcacattgggctaggaaaaaggacacagggagacacatgcaacaattaaagcttctgctctgaaataacacacatcattgggtcatattccattagcccaagcctaatgtccttggaatattaaagaataatccaacctccacactcaatccatctaatccgacaatccagccctgtcgtcgggtcacaaatacccagcttattctccttccacatgcagaacccatacccctctcccaagagaggtggcctagctagtcataacatcaggctcaaggcccatctcaggactgtctctgtggggcagagtgatctctctgacctcctgaacaaagataacatgcaccatggaacagagacagggtggccacagggacattcccagctggatcaggtgggggcggggatgggagcagtctcagccctacgggtggatattgataccactccataggaaggcccacagtaccttgtcttctgtgccccttaaactatagcctggcattatcctaagaaaattaaggcagaaatagaaaaccaaataccgcacgttctcacttaaaaatagaagttaaatgttgggtacacatgaacacaaagataggaaaaataaacttcagggattccaaaatgggggagagagggaggggttgaaaaactacttattgggtactatgtttgctacttaagcaatgggaccgttagaagctcaaacctcagcatcacgcaacatatccatgtaacaaagcacctcggcatcacatgatatacccaagtaacaaacctgcactcagcatcacacaatatactcaagtaagaaacttgcactcagcattacacaatatacccaagtaacaaacctgcacctcagcgccacagaatatacccaagtaacaaacccgcacctcagcatcacacaatatacccaagtaacaaacccgcactcagcatcacacaatatacccaagtaaaaaacctgcatctcatcatcacacaatatagccaagtaaaaaacctgcacctctgcatcacacaatacactcaagtaacaaacatgcacgtcatcaccagcaaatacccaagtaacaaacctgcactcagcaccatgcaatatacccaagtaacaaacctgcactcagcatcacacagtatacccaagtaacaaacctgcactcagcatcacacagtatacccaagtaacaaacctgcacctcagcatcacagtatacccaagtaacaaacctgtacctcatcatcatacagtatatccatgtaacaaacctgcacctcagcgtcacccaatgtacccaagtaacaaacctgcacctcagtgtcacacaatgtacccaagtaacaaacctgcacatgcatcccttgaatctcaaataaaaataaggtaaaatgcagattctcagacaccaaaaacaaaatctatggcacaagaggttttctctgttctattattcttgtccccctctaatgagggtggcagaaaataagctctacctgtggaaacagttctgtttcctcagcctgcttcctgaccagatgaggccgggggctcaagggttgttttaagccccagacaggctttggctgtatttgcccaggtctgtgattcttttgcagcagaattctcttaaaacatatttgtttcttatttatttgattccaggcagatccaggtagcattgaccacactcatgtccaattctcctgacttaattgtgggtgccctgattgcatctggcttctatgggacagtcactccctagtcttttgtcctggagccataatggggaaactgaggctcagaaagatgaagtaaactttctctggcttcagctctgggattgaacccagctctctaggtctccagagctgtctataccacctctgcccatcatccaaaatgtccagacttatactcctattctgtgtcaaataattccacagccttaataagcaattgtcagaggcttgaagaaaactgaattagatgtccctaagaactgcagaactctcagaacttaaagactctgttcagacccctgccctaagatgcttgaccaaactccagcatgggtcctagcaggatgaggccatgtccccaggatgaccccagcccccgattaaaatgcctgcctgagaaagatcaacattgccaggaaagtttacttttcattccaggccacacctgacctgggcctctgacctccctttcttaaagcatttactaaaatgagcttataattgtgaatgtatcttctgcaactcaggagcatccttgtggaggacccaagagctgttcctttgaaatgcagtcattaagaaggatagtgcctctgtctcccagcctctgtcagagaatggagccctaacttagatcactgcccactggcagacccgattggcctcaccgcatttaccccaaccaaccctctgaccattttcccttctctggctctgctgagcccccactcttcccacttcctccttctccctttaatacacccagctcacctctgcaggaatcagaatggggctctgctcttccccgcactggataaccactgttatccagtagttactggataactactgtggataactactgttatccagtagttactggataacatctgttttcaccactttaagtagtatccggctgtgtttatttttgacacccccttctcacccaatacttctttcacagacacccctttgctttctcccaaggctcaagtgtccttatcaaactttaaggaatgttaacatcactgggaggtgggagcatgcttgttaaaaacacatagctccaagcaccaatctctcgggatttcatttcatagagtgggtagagactgggaatcagcattttagcaaggaagactacctcctcagccccccaggggattctggtgcaaaggtaggcttgccactctttgaggaacattgccctatcaggtctgtaatttccacctgctaggggatgaataacgttctgtgagaaagtagcaagttcttccaaaggtgcttgcagacatgtgagaagaagcacttcattaatttgcaccccagtccttggaggtggcaccgtgacagttataattatccctcgattacttggagggatttaagtgttcttagagaacaaacttaggcacagaagttaagtgactgccaaatgcacccagcaggctggtggtgggaatcaggccatgaaggggcagaccaaggacacacaagtccccgcagaggccagacattagctacaaggtacaataaatcacctcctcttgtgcaccaacccagaaggagggaagaaagcagagaaggacaagacaaaaggaagaaaagagtcaactaatgttgtctcaatccacaggccatagaagtgcttcactgaatttcataaaacactgagttagttgccaatagtttcaaatcagatagctgcacataagaatgtaaatctcagcttctcaggaaaaatcagaggctctggaaacacacagagctaagggcagcaattcactttggaggcagcgtgcaacctcctgccactaaatgactgccatgctcattgacctgtgcaggccccagaggtgaccccggcccagtcagtggatcatacttcccgtcacagctaagcttggggagaggactagcgtttcctctcctcactgagtgtcaaataaatacctagcttggagggtctgcagagtggggctcctgtgatggacaagtgcttccagtgagtgtggaaagccctttatcttcttccaagagatctgtgcaaactccccctcctccagcagaaaaggcaatggtctggacatttcattgcaccttggaacaagtaaatcactttggactttcctaaaacctgctctgtcaccatcggccattgccaggccaaggaaacagagaagaatttgtggaagcaaaacagctccttgcgggtgagaaaaatcttacttaggtttttctggcagcagaagcagttgaacaaagagagacttctaagagaaaatgaaaagctttagaatgagtttatcgccaacaaagccagctcaagcttggggctttttcataatattttaaaattaagttaacattcatttaacactaaaacaggaatttaatgaagtctgaaaaataatccggcctttgaatgagatatctaaaattccattttaatatgcaaaacaatgtaagataattgtattcaagcaataattcaaaaacattttatcataattgcaagttcacacaaaaatatgaaggaaccactgtaatattctcaatatgaggaaatatgggggaactaaaaaagtaatggtctttaattcaaaaccaactaataaggcatatagataagtattagattactgtacgattttatctgcaacagttaaaccctggaacatggctgagaatcagtgaaaaccaaagtcatcctctgtaaccagccagatgcacagtcacttctggtcgcaattagccatgcttggacagtcacgttttctccttaagaaaccaaacagaattccagattctctctatcctgccacaggttccctgttcataacacattttttattcttgagtctattagctccagatgatatccagaaactcattttcaaaagcagcttttagaaatggcacaaaacggctgggcgcattggctcacacctgtaatcccagcactttgggaggctgaggtgggcagatcacttgaggtcaagagttcaagaccagcttggccaacatggtgaaaacacatctctactaaaaaaaaaaatacaaaaattagctgtgggtggtggcacaggactgtaatcccagctacttgggaggctgaggtgggagaattgcttgaatccaggaggcagaggttgccatgagccagggtcatgccactgcactctagcctgtgtgacagagcaagactctgtctcaaaaaaaaaaaaaaaaaaaaaaagcacaagacaatatggatattttcctgtaagtgaaatttataaacatgaagcccacaattatagagcaaagatagttgctttgcgtttcctaggatcaaatggaagcccctattcagaactaaatgggctggctgtggtggctcacacctgtaatttcatcactttgggaggctgagaagggagcattgcttgagttcaggagttcaagaccagcctgggcagcacagcaaaaccctgtctctacaaaaaaatacaataattagctaggagtggtgatgtatgcctgtagtcacaactactcgggaggctgaggcaggaggatcaattaagccccagaggtcaaggctgcagtgagctgtaatcacattattgcactccagcctgtgcaacagagtgagaccttgtctcaaaaaacaaaacagacaaataaagcataaacaatttaaaccaggaaatttcttctgatctattctgtgtgtatgaagcacctcctatctagaacatgggagtgatattgtacatatatgataaatccaataagatctctttggagtgaggggtgacatgagcataggagactggctttatgcattgcaaaattgtcaaatgctgtcttgggactccttgggttatagatgacataagcctacccaactcaacttaatcaaaaaaggaattaccggttcttgccactgaatagttgggtttggatgcagctggttgcaggagattcaacactgtcatcagaactctgcatctctccacatctcttcctggtgttggcttcattctcagacagtctgtctcttcatatagctttctgcaggctcacagttacattagccttgcagcaatctcaggaggaaaagtgtctcttaccctatggttctagcaaatattaaagagttggcttgttctgactggatcatcttgaattgaggagaaatccctaaacctactgtagtagccatccatggaaaagaagtgttctaattggagagaacaggtttatggactcactccaggatccttgggaaagaggtcttagccccacccaaatgtcatagattgcgcttggaggaaaggctaaccccctaagaaaaaatcatggtgctgttatcacaaaaagaagacaagaataatagacaagtaaaaatacccattgcttcctacacatgccctagaagacatttaatgtatgtgcagtgggcattcagagagagaaacagaagtgttataacacgtgcactgcctcacatgtaacaggaaaaggacaaggagagggaaggaatggaggggaagctgcccgcacacttggcttgagttcagtttctttggatcctctattttctcataaatcacagcccatttgacgataagaatcacctcttccagtacccaaccattgtggacctaagaaactaaagttacatcgatctatgctccattcatgattaattcattcaataaatactgatttagcaactactctgggcagagtcctcatcgatattccagagttagagtaatgacaatgagcacacaaaaatccttgtccttgtggagcttacagtcaagtcaatggacacagataacaaataggaaagaaaaaaattaacataaaggatgtcagagggtgataagtacttgggaaaaaaacaaggcaggaaagagaaaaggtgtgtcaagggtaaagagacattcttacagtaagattatgaagtctaaagaaagtgaaggagtacaccatatggctacttaagggaagagcattccaggcatagggaacagcctgtgcaaagccctgaggtagatctgtgcctagacgctttaagaagaccagtgtggcgtgagagtgagcagtaagtagatgaagtgagaatggtaacaaaaagtagagggtataggaccttagatattgtaagaatgctggtttttactctgagtacctgggaaacagttggattatttaaatagtagaggccataatatgacatctatttttaaaacatcaccctggaatggactacagagggaaagagcaaaaacagggagacatctgcaataatctaggttagagatgagacggtggctaaggaattttggccatacttggaaggtaaagctgacaagatttgctgaaagatttgatttgggctattctccaagagagtagtcaaggatgaccctgagaatgggtcatccatccatggagttgctgttcattggtgcagggaagaaaatagaagaaacttgtgagaaggtggtagaaggtaggagtttcatgttggacatgttgggtttgagatgttggttagacatctgagtgagtctggagagtaggtagctggtatacaattctacagttcaggaggcaagtctgagatagaaatgaccatttggaaatgaccatttttgtcgtgtgtataaggtatttaaagccatgagattaaaggcaatcactgagagagagaccgttaataagagaggatacgtataaagacagcctggggacgttccaattttagcaatcaaggaaaggaggagaaaatggcaaagggatctggaaagcagacccagtaacgtagaagaaaagctacaagagtctggcttcctggaagccaaatgaacaaaatgtttatggaggaaaaacttttcaaatactgcaaatatttaggaaatatttcagattgcaaataggccaagtgagatgaaggctgataattgacaatttcctggccaatgtgtaggtcattagcagtttcagtgtagctataagaacataagaactggagataaaaaatagcagcaattcttttgtagagttttgctgatatatcagctatttggaaaggtgacctgctggttcaccagcttcaaaaaaactctttaatttattgtctcatattaatgtatgatgaggagccagactctgttggagttatcctctgcatagcacttttcagaaagaataaaaatcacagaatgacaatgtaaatcatcaagaccaaggtgtttccaaccaatctcaaattaagataagcacgctgttcatatgaaataagccagaagttctctatttcattcttttttttttttcttgaaacagaatctcactctatcacccaggctggagagcagaggagcagctcactgcaacctccgccacccaagtagctgggattacaggtgccagctaccatgcccagtagagacagggtttcaccacattggccaggctggtctgtaactcctgacctcaagtgattcgccctcctcggcctcccaaagtgcttggattaaaggtgtgggccaccataccctgtctctctatgccattctatatatcaacacaaacatttaaaaatgttttattctttcttctttcttttcagtaatattttcagatttccggttccaggcatggtagaacctttctacagatagcaattacaaattctaggggaaaaaatatactagacctggccacttaagggaacttggaagcaaccagaagcaagcagaacctgaagagatttttcattgcaaataagagagtgcacagagagtacgacccatattcatacaactttgtcccttaggtgcaagctgaaaactgtagttatattgacttgagatgtcaaagaagggagtttgaaactgctggtgtggatgaaaaatgaaggggaaatcctttaaaggaagaagtcacagaggagggggagtcaccaaacctgtctataagctacgctccaatctagactcatccctaaactgcatgtgaatgatggagactttaggaatcaaaggaaataacaatagctggaaggctaaaatacagaccagatatgtcagcctcttttctgtgcatgggagccagcgtttggagcttgtatcctagcaagttaaaggggcctgagaaagacttcaggcattccactgaaatcctagaaagactgcaccttaggaaagaacattctacccctgaattaagggattcttcctaggtctaagggcaaaacaatgaacttaccctaaccaagcctccagtggctccagatggtctaccaggaatttatctgggaccaggggcagtggttcatgcctgtaatctcagtgctttgtgaggctgaggcagaggatcacttgaagccagtagtctgagaccagcctgggcaatgtagcaagaccccatttgtacaaaaaaataaaaaaaaataggagtaaatgcctgtaatcgcgataactcagaaggctgagatgggagaatcacttgagcccaggagttcaaggctgcagtgatctatgattgttccattgcactctagccaggcaacagaacaagaccctgtcgaaagagaaagaaagaaagaaagaaagaaagaaagaaagaaagaaagaaagaaagaaagaaagaaagaaaagaaagaaagaaaggaaggaaggaaggaaggaaggaaggaaggaaggaaggaaggaaggagaaagaaagaaagaaagagaaaggagaggaaaggaaaggaaaggaaaagggaaagggaaaggaggaaggaaggaaggaaggaaagaaggaaggaaggaaaaagaaagaagacttgggaacttagtaataggagaaaaaaatgagtaaaacaaaactcaacactcttaagaagaaactaacagaattcagagtctttacaaaatatcattcacaaaggcctcagaaacctcactcctggccccacttgtccccagctctctgtggaggaaagtacatggagcccctgggaattgtgggtttcctagttaaaaaagaaaaatcttctagcaaaactttacactgtaggccaggtacagtggctcatgcctatactataatcccagcactttgggaggccaaggtgggaggatcatttgagctcaggagttcaagaccagccttggcaacatagcaagatctcatctcgactaaaaatccaaaaaattagctgggtgtggtgcctcacctgtagccccagctacttgggagactgaggcaggaggatcacttgagcctggtacattaaggctgcagtgagctatgattgtgtcaccgcattccagcctgggttacagagaaagaccctgtctcaagaaaaaagaacaaaacaaaaaaaaaaacactgtaaaagaaaaaacacaggccactccctctagggtcacataatcaagccatcgaacccaaatctagggaccctgagattactttaggatggtgtgacatttaaattagagcctgaagatctggtaagcctgagccaggaagaggaaaacgatcaaatgcccagagacgagagagaacatgggtatggctggagtatagggaccagggaagggaggggaaggactggtaggaaatgaggcaggagaggcaggcagatgagaaagagcctcttccattgtattaagcaagttgggttttcctgagagtgatggggtaccaacaaaaagattcaagaaaaactatatcaacaaaattttagtgctgaaatatcctggcttctgtaatgagccgatctggagaaattaagtatgaggtatccaccgaatgtccagattctgtaagaaatttagttcattggttcagaactcagcataatggtttaggctgctatggattcttcagcctactaggtatgactaaaaccctggaagtaaatgagatactcagggagcaactggggaaataaaaaggcccaaggcagaaaactgatagtcaccagcatgcagcctaattggttaatgcattaacagatagcactggcataacatattttatagtacagatagggcctccttgaaatcagtctaaattaatgaggtgtccaacactcaggtcacttaattgatttctgtttctctctctgttttagaggatcttgtagaaaagtggttctctatcagtggacatgtggtatgtctgaagacgtttttggttgccacaactggaggggggatgactattagcacctagtaaatggaggccagagatgctgccaaccaccctaaaatgcacagacagcaccctataacaaagaaatatctagccctacatatcaatagtgctgaagttaggaaaccctgttgtagaagcactttgactaccgtaggcttaccagcccatgcacactgataacttctgcactttcttcccaagcatttctgtagggggatcccagtttatggttaatatcaaaggaccctcaagcacactgttagcatcacataactgaataaatctaaaatctgaaaataccagactacacagattttggggaatatgggaactattgcttttacttattactatcaatgtgagaaaactaaacagaccaattcagtgacagagaaggagtgcttaggtcagcactgagggttctctgctaagagggatacagcagatgtctgaggaggctcaacaggcatcacggatcctgtgcaggaggtctatgatgccatgaacacaaaccacatacagttatgtacaagagggatgagtactgccaggaagtgcttagtatttcacgtgtagaatggtctctctgatcttggaggaaatattcaaccagtaatttgatatttggtttctgttaatgagataagtgaggatcatgtaaccaaagatttaaagagtagcagagagtcccgttcactgattatgctggtgtagtgctgtgccgcgctgttatctaaaggaaagagggaagacatgggatttgcttggagctgagcctcagggtgactttgtcctcccagaagtgaatttcccactgtcttaagcccctgctctgacgcaaagcagagctgggctctaaagcccaaatggagaaaagaatccagtttgagccaaaccatttagcctggtattccaatgggaatgggtgtgtctggcaaactgataagatagtggaccaaaactctacttgaatggagaatcgcagaacctctcaaaagagtactggagggcagagtgagagagagagagtgagagtgagagtgagaatgagagtgagagaaagagcaagagagagagagagcgtgtgtgtgcacacaagtgagcatgcttaagcaagtgaatcaggctaccttccactccaagtgtggtcctccaaccagcaacatcaacatcactcggaaacacagaaatctcaggcccaccctgacctacttatttagaatctgcattttaggaagatccctggtaaagtctgagaagcactgattttaccctttgttgagggaagagggtaatgtcctcaggtacaggtggttactgtctaccagaaaccctctccacccatccccttagttcatatctaaatgctgtggcacccctagaagagctatttcattgaaactctgctcacttgttgggttaaagacagatacagctttggtacagggagcacattaggcaaatcaagggaaatacatttcctcacactttgccaaacacagctacggcacctctcaacccatattcaaggctctgtccagattcctcaaacatctactccctccctctgagcagaggacctcccaaagttgacttaagtaatcagatggaaacacctcagctctcctctacccaatacataagtacatctggcttcctctcacaaaccacttaaaagagcagaactcctctctctatacaaggtcaaatcctgcagggctgccctggaatgcagacagctgctccctgcttagagatcacatcatgtcaaataccctctccactggcttcatcctgttggcattaaagcatgctgaattctcttcgagaattactttggaaagaattactaccctgtaagctttcctattcagccatgttgacttcaaaatttgtttagtacaatatttcaaacagaaattttgtgtctgctgcccattttgcacaactcttaacccttgtttacatttgtttcagatacatttgtatttccaaaataaaacaattgttttaactaaagttccctgtgttcctctctctgacctctgctaagaggtaactgctgccctcaagtgtgtccatacacaattcatgaatgctttatgtttgtactatatgggcatgtttccatatgcaacatagagtattattttgcaaacccttaacattaattagaaggtataatattatatggattattctgtatcttgctttcacatgaacagtttttgagatattacaatgttgacttcatgctctctttacttctatgctattgctggcatttatatttcctctttttaaaaccccatgacatgttctcattgttttattcaaccagagtttgtgtgattcacctacacggttatcccatcctttttttataatttttcccttcatgttcgccttctatttacaattacagtccttctgcctaaaatgcaccctttagaatcctcttaatgagagtgtgttgtgggaaaacttactcagtttttatctgaaaaatatctatattttactctcattgttgaaaaatatgtttgctgggtatataattctaggttgacaagtttttctctaagcatagtgaacatagcaatattccgtggttttctggcttttataacttttatcaagaagtttactgtcagttttattgtctttcctttgatgattaccccttttttctgatctcatttttaaggttttatctttgcctttggtcttcctctgtgacacatagggtgtattttttgcttaattatttttcttttgttagaattcacaaatctatagaatggcttctttcatctcttctggaaagttctcaaccattacctattcaaatattgcttctgttccattctttttcttttttccttctgcaagttttattggaagtgtgttagaacatcttacttcattcttctttctccattattcattctcataacttctgacaggcttctcatttctttgattctgtgctatcttctgggtatttttttgctctatcttttgctttattgtgcacattataagccattatattttgatttctagaattattttattaatacagtcagtcctattctgtagcacctttctctttatttgtattttgtttatttcttaaagcatattcaacgtgtttgtcggtgtttaataattttactctctgaaatcttttccatcctaatacttacatttctgctgctcctgattcctgtgcgtaattttttattgtgggttatatttttagaattttatctgtggaactggagacctggttagaaagcaagatccccaaggagaattttgatttgcttctgcctcatgcctttggatctaccagccagaatcaagttgcactaaatttttggcaaaaaaaattttggcctatttgggtggttcaattttgggttgcaaacctacgtgagagatagtttgtggttacgaattttaagaggttttttgtttgtttgtttgtttttgtttttgtttttactctccttcacctactcagcttcaaactttgagatggacaattttctttaaagttccctggtgagtggtcagtcatgagactgagtggtttatttctagttcacaattacaaggaacattggccatttgagatataagctttcagtgtggggaaagggaaggggaaggaagagatttctactggactcctacctttggacagactctagacttactatgtgctctacagagccacaaaatccaaaactcaaggttactcaatttagcaaataccctcaaactgaaagctggtttaaatgctcttcttgcttctgggctcctggttttacttagtttttgacctctgactattcccaatgaatgcacggttcaatgatgcattttccaatgagttatatacccagcgttttaacagaaagatttaccggagtccctagtctattttttctatcagaattgaaattttcatctactctttatataaaattgtacttctaaggttcacatttgctatggtttgaattcttgtccccttcaaaactcatagtgaaatttagctgccactgtaacgtattaagaggtggaatatttaagaggtgttttcatgaacttaatgcctctctcatcctctctttgcctttccactatgtgatgttttctgccatgtgaggatgtagcaagaaggcccttaccagaggccagccccttgattttagacattccaaccttcactgtgatattctgttaacagcagcacaaaaaaattgactaaaaaacatttaattaagttattctgtttaaaatctgtgtgggctccacattgccctaagggaaacaccgcatcctttgcatggcttaaaagccgcctccgtcttgcctctgcagatctctcgaggctttgttcttatcagtcgtctcccatgaagcttttttgctgaagctggattaaactgcttgcaatcatcagagaaccccacatcctcttcctctctaggtattcaaatgctatttccaccccttctttttttctctctttccttcttttctccatattctgccttttcttatctgactgctggtcattgtcaggtttcagttttatcgtactttatggtacttttcctagaaatctggactcagggtctttcctctgtgcttccactttacctgtcttagtgtaattgcatctttacaggtttgtgttccctgaggtttaagactgactgtgaactttccagcatggtgtctggaactcagtatgtatgcaatgctgattctttgtaataaacttttgttacaggagctctttgaagctctagttgtcatcatcatggtacccgtcagaagacggtaatagaccaggcagaaatgactgtgaaccctgcctgctgtagatgaggtcatcaaaagtagatgctgcatgccaggtggacacagttgtccaggtacctcagtggccattgtcagcagactcaacaggtctgtaagtgtgaccagatccagcagaggggctctggagtggcagtggaagcaaatgagatatcactccggacaactgaacacactcacttgtaagaaagtgtgagccaccccctggaggcttccaaaagtcttgagtgacttttatagagaaatagagctctaagttagcagtgcagagccaaaagtatgtaatggaattcattgcttaattgattctataggcaagtgaggcccagagaaactcagtttatgcccagatggatatgacatcattcctgcccctcagttaacttaccaactagtggaagaaagagcaagttaacaaaatattaactttgcaggatgagaagtgctacagagctaagctatcagagccctggtgacttagtaacaaaataaaggggcctaacacaattgctacttctcccattacctcgcccataagggacccaaagtgtgaccaaaaatcagcatgggatgggtggagctgctggtttcctgatactcttatcttcattatatataattattttatcattcaaagtatttattttttttctaatctctaaccaggccacatttcttcccaactggagaagcagagggctagctgtttgagtctaaagagtggagtggtgagggctgagcctgggaattatgaggccaaatcagagggctttatgtataaaaccaggagtctagacccttcttgaggggaaagtgggatcctcctataatctagtttcctagaggtttttttttaatcacattctagagtcattggtctctgacagagcccccagatcaaatacttgaggtccatgcaggtaagacaacaaatgaacctggccagcctcctgatgggggtatggccactgccccggctaaaagggacaacatatcccagctccaagttcctgtcctgtgagattctaagctcagttttgtgagattcatggttttctaaaaaaggccaaaaagtctagattattcaaaaatcatatgatcatctcaatagatatagaaaaagcatttgataaaattcaatatccctttatgataaaaacccacaacaaaattggcatagaagggacacacctcaaagtaataaaagccatctatgacaaacccacagccaacatcatactgaatggggaaacccattgagaactggaacaaggcaagaatgctcactttcaccacttctattcaacatagtactggaagtcctagccactgcaatcagacaagagaaagaaataaagggcatccaaattggtaatgggaaagtcaaacttacagtataattatataccaagaaaaccctaaagactcatccaaaaagctcctagatctgatcaatgaattcagtaaagtatcaggatacaaaatcagtagcactgctatacaccaacaatgaccaacttgagaattaagtcaataactcaatcccttttacaacaactgcaaaaaacaaacaaataaataaataaataaaatacttaggaatacacttaaccaaggaggtgaaagatctctacaaggaaaactacaaaacattgctgaaagaaatcacagatgacacaagcaaataggaacacatcccatgctcatggatggatagaatcaatattgtgaaaatgaccatgctacccaaagcaagctacagattcaatgcaattcccatcaaaataccatcatcattcttcacagaactagaaaaaaatcctaaaatttatatgaaaccacatagccaaagcaatactaagcaaaaggatcaaatccagaggcatcacattacctgacttcaaattacactacaaggctatagttatcaaaacggcatgatactggtataaaaataggcagatagaccaatggaacagaatagagaacctagaaataaagacaaataattacaaccaactcatcttcaacaaagcacacaagaacatgaagtgggtaaaggataccttactcaataaatggtgctggaaaaactggcaagccacatgtagaagaatgaaactggatcctcatctctcaccttatacaaaaataaattcatgatggatcaaagacttaaatataagatgtgaaaccataaaatttctaaaagataacatcggagaaacccttctagaaattgacttacacgaagaattcaggactaagaacccaaaagcaaatgtaacagaaacaaaaataaataaataagacctaattaaactaaaaatcttctgcatagcaaaagaaataatcagcagagtaaacagacaacccacagagtgggagaaaatgttagcaaactatgcatttgacaaaggattaatatccagaatctgcaaggaactcaaatcagcaagacaaaaatgaataatcccatcaaaaatgtgggcaaacaacatgagcagacaattatcaaaaaagacatacaggtggggggcggtggcttacacctgtaatcccagcactttgggaagccaaggcaggcagatcacctgaggtcagaagtttgagaccagcctggccaacatggtgaaacacggttctactaaaaaatacaaaaattagccaggtgtggtgatggatgtctgcaatcccagctacttgggaggctgaggcaggagaaccacttgaacctgggaggcagaggttgcagtgagccgggatcatgccactgcactccagcctgggtgatgagagcaagactgtctcaaaaagcagaaaaaaaaaaagatgtacaaacaccaacaaacaacaaacatatgaaaaaatgctcaacatcactaagtgtcagggaaatgcaaattaaaaccacaatgagataccaccttaatcctgcaagaatggccataactaaaacataaaaaaaaaatagatgttggtgtagattttgttaaaagggaacacttctatgcagctggtgggaatgtaaactagtacaatcactatggaaaacagtatggagattccttaaagaactaaaagtagacctgctattcgatccagcaaattcactactgagtatctacccaaaggaaaagaagtcattatatgaaaaagacacacacacacatgcaagtttatagtggcacaatttgcaattgcaaaaatatggaaccaacctcaatgcctatcaatcaacgagtagataaagaaaatgtagcatatatacaccatggaatactactcagccataaaatggaacaaaataatggcctttgcagcaacttggttggagcttgaggccattattctaagtgaagtaactcagaaatgaaaaaccaagtgggagctaagctatgaggatgcaaaggcataagaataatataatggactttggggactcagagggaagggtaggggggagttgagggataaaagactatacatagggtacaatgtacactgctcggatgacaggtacatgagaatctcagaaatgaccactaaaaaattgcccatgcaaccaaaagccttctgtatgtatcccaaaaactattgaaatgaaaaaataaaaaaaaaattaaattatgtaagtcttaaatttttaaatatttattcaaaactctttttaactctttgaggactgacagggcaccctgggtgacctctggtctatgagccaagacttcaatgccccagcccaactcagccaggactgcactctagcatcttttggagaggaaccctttcattgtgaaattcctctttcctctcaccaaccccctgggtcagggtaaactcagtaagtgtggactgtctcatactgagttgtctccaaggggtcccgtgaggttgcagggcacccgttgctgtggagtcctaaagagggctttcagaggcacaaagaagacagacacagcaacaataacaaatgaatgaaggaatcagtttttcccaagaaaagagccactgtatcccaataggcctgtaccaattccagggaaagaacaacatagcgacaacataaagcaatctgtgtgattaggatgctgcactcatcccagccaggtacatgtccttgaactggaggtgctgcgcacggcacctgtttacaaattaggcaaccggaggtgctgaaaagtattcatctcttctgctgcttccttcagtatgtataatattagcaaaatgtcccagtggctggtaaatcatctttaattcctttggaactcatcatagtaatgttaaccatgatggattcttgtggtatttaaagaactagattgtcaattagcttttatgagatacatcacagtcatcagcctcatatcagacctccctttccaaagaagccagttattaaaatgtacaataatttgcttttattataatctagctaaaagccaaagctagtctccaaaataatttaaagttttaagttgcaatgtaagagaccttttcttggaaatgactgtataatatagtgtcaccattgttggttaattatttttcagagtgtgaatttcagctaatcgtttcctgcaaggaccaaataacataggtgcttcctaacagcctctctgggaataactactgtcctttcagaagctaattaatcaagctgtgctcgtaaaaacttaagtaactacccaccagggtgagagtcccccaagacctccctgctcctggaagtctcttgcccactgtattgaccttggccgagagaagggcagtgagtcaacttgacttggcacagcacccaccagggaccttccatgccatccagcatggtcatctgcccagggctatctggaactttaaaacctcatctttactgagagtgcccttcagaacttagccagtgctacctgcagcttgaggaggcaaagacagatgagctcccatggaaacgtgggaaggtgaggaaaagcctagttctgtgttttgatttcagtaaattattgtgagtttaacttaatcaccatttgccaggcacttgaggaaaatcaaatcagggaattagctctgacctcaggaatatacagcccagtggtacaaacagacacaagctactggtaagaggaagcagagtttgcagttcttccctctgcagccccacaaaggtgcatatctccactatcaaatttatctcacgggactgcaattcatagactcttgtcattgtgtgtgtctttctccctagtagcctgtaaattccttcaaggcggaaaatttcatctctgtatctgtggtaccttgaacagggtcggtcacatatttgtttaatgaatgaatgaatataataacaataataagtaacatttaatgggcctttaatacacatctatataagcaggtcctaggttagatgctttacaaatatctcataaaattcctccaacaattctagaagggattgtatagggaagtatggagttaatactccccattttactgataagaaacgatacttggagagacgggagtaacttttccaaagtcccagagctgttaagtggcagagaacaatggatccttggtctggctgactcgtaggttcatattcttttttatcattatgcattactatttcaataaaaactccagaaaggcctacaaagttacacacaatcacatacatgcaatagagggtgatccattccaaactaaggcaggaaagcaaatacaacatgtgccataagattctggaagccttcctgcaggcagtggtccctgagctggtctttgaggcacagaaggacttttattagcattcccatcaaaaaaaaaggaccatgcagaatgcagggaaagggaggctaagtattgatatgagggtgtaagcgtgaagagtggataaattggctacaccttggaatttacttctatagtctctgtcgaccttgtagagcttcaaataagcagcctcaataccacgatcatgtctccaatccccagcccctgatattaactcaagagcagtacaaactgaatcaatgcaccaaatgatttttccccaccgctcccctgtgtgcatataaacacacatatgcacacacaccatggatacagacacacaccatgacagctgtgaaaggaagggggaacaagagctcagtcgtcgccgctggccagaggagataacatttcaggcctgatttaaactgcccattatgtccatgattcttgctgatgggtgcctcacaataaatgtcctaggcttgtctttatcaagcctcctccagtcaaggctcagagttatgagtcactgttggagggagaaggaatgggcagggaaggggttgtcagaaaaggtgtgtaaatgggacaggtccagtggtcagggcatccatacattatttctcagtcagtttgtttacataaccacaattcattctcttgggtgccctagaaaaacaaatggctagagagctgaattcaaaatatattatttgagctaaacacaaataagtaactcagttatgaggggaagccccctctcacccatcattttgccaaaatgaactcttcatggttgagtggccctcccctcacccccattcctaagattagtttgagcttgctctggaatatttattgaggagacctttcattataaagcagccaagtaccagttacctgaaatatatgcaagtttttaaagtctacattcaaggtttaaaacctttttgtgtatgaaaaatgttctacctggcctctccctgtctcatttgggagattaaacggtagctatatagttgaactgcaatttgcttgactctgaagaagccattatcattgaaattcaagacccttgatctaagatgtcttggagaactatagcacactatatactttattttagagtgcagagtacaatgcagaattaggccttgtaaaaagttacaggagaaagccttgtatgaaacaaaatatagttgtcataacaactgatctgcatgggttgtacatcacccagaaagtttgaggtgtgggttatcccaatcaagggaacagctggagtacagtcaacagtaaagcaagcaggctattttcttctgctatgaaaatggatttttcctcttgagtgaacaatgcaggaatgtaactgaagcaaagagagcctcagtctgggagggacaaggatagtaaaagccaaagaaatattccagcagggagatgatcaggatggcaaggatccaagaaagacaggattttgcaaaagcagacagcctaacttacaaggtcatttaacaccaaacagtaacaaaaaagagttctaagtgaaagacagcaaaagcacacacaaaaaagagaatcgaggttttatcagagacatttgtcaaatgaagttatagtatcctgattacaaaaaatgtggtaaggttttcactaaggttctcatctcttttgagttgccatgatgttggtcagatgcagtcattagccaacctagtaatctgtcaatgctatgtgattaaaaatgtgccagtcaccataggtcatttttcagcagtctgtattcagactatattcagatcatctgaacacagtcaccaaaaacacttgtttggaatacaaatttctaggctcttccacagacctacctaatccaaactcctaggaaccaggcatgggaacatgaatttttaatagagcattccaagtggatcttaagtatactaaggtttgcgaagtactaccatattggacaatagagaaaatatgagatgtggtcccacctgtcacaaagcatgcagtctacttgtagaatttagacagtgcttaagagtcttttgggtgctataggaccctaaagacaattaaaactcaaagagtccttcaggaaaacttccttaatctcactgtacttgccagacaaatgtgcctttcattttgtttgtcaactttcagatgacattgcctcttttctacttcttatttatttatttatttagtgtctcctctcatgcaacttaagtttcttgagaacaggagctgtctaattcatctttctgattcatgaatgcttgaatggatgatacataaatggaggagggaaggcaagagcatagcaattagaaaagtcttcctagagtaggaatgtgttggtgtaaaaacagggttgtattatacacagagcagaggaaagagcatgggtaggtatgagataaccatataagcaaggtgacagaggcagagaaggggcattgcgtatgctaatgcccaaatgtgttaaatactcaaagcaatattatagtttcaaaaacattccaatttttacatttcatttaaaattgtattaaaaatataaactacctaggaataaatttaacaaatgtgcacaagacttctatactaaaaattataaaacattgctaagagaaattaaagaagtcctaagtaaatggtgagatatactatcttcatggattgaaagactcaatatctccccaaaatttatctatagatttagtacaattcagttaaacatcaagtaggttttttttttgaatgttaaaaaacaacttattttaaattttttttgtggggagcttgataatattattagctttatttgttccagaatgtgtaagggcagcaaaagccagtcttggaattgtgtctttaaatatgcatatatatatatatatatactattttaaattttatttggaaattcaaaggaccaagaatatccagtctgaccttaacactcattataaagctattgtgactaagaaaatgtttttgttgaaagaacagacaaatatgtcagtgaaacacaattaagagttcacaaatagacccatacacatataaaatccagtgatttgtgatcagaatggcaaagcaattaaatggggaaaattatattcaatacttttttttgagatggagttttgttcttttcacccaggctggagcacaatggtgcaatctcagcttgctgcagcctccatctcctgggttcaagtgattctcctgcctcagcctcctgagtagctgggattacaggtatccaccatcaagtctggctaatttttttttgtatttttagtagagatgggattttgccatgttggccaggctggtatcgaaactcctggcctcaggtgatgcacccacctcggcctcccaaggtgctgggattacaggtgtgagccactgtagccagctttcaatatatttttattaacaactgaatattcatacaagaaaaaatccatgagtgttaccctacaccatacagacaagtaaattaaaaaaataaatgttaggcttaagaaaataacatgattcaaagagaaaagatagagaaacgtcaccatgaccttgatgtaggcaaagagtcttagcacacaaaaagcactaaccataaaaaaaattgacaaattatacttcatcaaaattaaaaaagtatcccatcatcaaaaaaataattaagaaaataaacaggcaagctacagatcagaaaaattatccatatctgactatatatttactgcaattcaattacaaaagaacaaatggcctacttttttacaaaagcagaaaatatgaacagatatgtcataaatgaagatgagtaaatggccaataagcacatgaaaaacttctcaatattattaatcatcagggaaataaaaattaaaacaatgaaataccactacacacccattagaatggctaaaatgagagaaagcttgacaatcccaaatgttggcaagagcatggagcaacaggaactctcatatattgctagtaaaagtttaatgatacagttattttaagaaatagtttaagagtttcttaaccttctaagaatattaaacatacatattatgactcagaaattccacagcaaggtgtttatccaagagaaacaaaaatatgtgtccacaaaaatccttataaagaattgtttcttcataattatcccaaactataaacatctggatgtccaccataagaagaataaatcactgtggtaaatttatataatggaccactccttggcaagggaaaaaaactactcatacattctatcaacatggataaatctcaaaaatattacggtgagtgaaagaagccagacacacatacaaaagtacatactgtatgattctatttatacaaacttctagaactggcaaaactatctatggtaaaagaaataaggtgagtgatcttcctggagggaagagattgactggcaaggggcacacgagagctttctggggtgacatatctgaccatgtgtcttaaaatgggtctgggctacacaagtataggcatttgttaaggcagttcaaattgtgcacataagatctaagtattttactgttcatagattgtatctcaattttgtttaagtccacaatttctagatgacttagaacaagataggctatgttgtggttaacaatccccaaatcttaatggcttaatacaactaatttttatctcttcttcaaagtatactgcaggactgggcaactgtccagggtagccttccttcacgttgtgactaagatccaggtcccttcagtgttgcatctccgcatctcatcttgatgcctctgccagttttcttaaagaggaagagagactggtgaacctgcaggggctttcaactgcctctacccagacatgacataagttacttcctctcacatcctatagaccaggagcagtcacatggcctacacttaatgtaaagggttggagagtacagactcctatatgcccatgaaataaaggataactagatactggtgagcattagaaatgcctgctacaataccttccttcaggcccttccattttatcaaagaagaataaagtctaactttctatcagatgattattacaatttcatccttgtgttcagacatggtcttattaatgacatgcccttctttcaacaaagggagatgtttcccttcttcaaacatggctgagctaatgttttctggtagacaggagtaaagaattctataaatgtagaaaaacacaacaaaaaaacaatctgtgaaattagctgaagaagtcagagcagatgcacatccaagttcagtgagaaggagacacaggattgctgaggtaactctgaggggcacagagtgacaagtgactgacaggccaatctggtccagaataaattatgattggggataatggccatgctagatgcatgctgctgtggagaaagtagacattatgaaagaaaaagggggtgtttatccggtccagagtgacagtttgctgcttgtcaaaaatctttatttccctataactttctgagtttgtaggtgccctggagaaaggcccactgtagcacaccacagaaaaaaaagggggaaagacaatacctgttttacaactaccttttctgtttgaaatttgcccaaatggtcttgaacatcacaacaattaaaagaaaaaaagaaaatgtttctgcagatccaataggtaagatgtcagggactctattttgaaaatatctgggaggcactgctgattaattttggcttatatttgagaagagaagcaggcacattttcgaaaccaaaatgtggaattttctgatcatgtagcacctttaaagttcagttatatcaggaatagtcagaaattggactgtataactgttcccacaaattgttcaaaggttacctctcatccagtagacagggactgaggttgcataatcaccaaagcccagctcagagaggaaacacacagaatattaatatccttgaagaatttccatccacttgggaagagagatgtagcttgattgcaggatgggttaagcatgtgtagcacacaaacatatcatcagtgttgttgatctagtgcctgcctccacttattccagaaaattgcaggagaatgattgcagggtgccaaaacaaggctgtcagctgtgaacctggtgattgatgtggcttgtttaagtgtgttcagccaaaaacaatttggggtggccagatctaccttttcttctttgggtgcataattgacacaccccatttaggtccttgactgatgtgccagtcaagaatatttctgttcaagagaaagagaacccaaatcaaattggcttaaggaaaaaacaaaggtaacttatgtgactcatatacctgaaaaagtacagtcactgagcttcagatacagctgtatccaaaccctcagatgatttgcacctcacctttctccaaatgttggctctgctctcttccttatggttttactttcagttacttgtgatttcaagacacaatttcaagtgtgatagataagcaggagtttattttctaatagatctgttcacattctctaactcacactctttagaccaacatcttcatcttggtataatgaaacaattcctgtggtcaagagatgtaattacactgattaagtttgactcatattgcaactccttagccaatctcctctgactactagggtttggtgttctgattggtcaaaccagagtcacatgctcaacctctgagagtatccccacctgaaccaccacgtaagagtgtggggagagaaactgtttcacaggggaaattctaggtatttatcagaagaagcagaaacagaatctgggcagacagaaaaaatgacatctactataaccaaagctaatggtatattttaatattatgtactggaaacaccttcacagaaatttagggtagggtccatacataattcataaaattgtagattctgagggttagaaggtacatcagaggttataaaatcaattcccaattgtgataagttgcagccaaattttaacttggtaaatgaagtggaatagagtatgtggcacccttggtagattcttaaacatttgagggtccaaaaaatattactaagtgaattaaggaaggaaggaaagtctttacagagcttcttggttcaattaaagaagctcctcttactctcttaagggttttaaaaaatgtatttggacaggtcagtttcagcttaagtactggcatcatagactatatctgactaaccctcctgccgataacaactataaagtctgcataaattttttttaaaaaggaaattgttggaaggcactagagaacaacaaaaatctggaataaaatggaggagacataaccctcaaaaagaaggaagcagactaggtgggatttacattacttatttttctcaagggtcctacaagtttgcagagcacagggtatagagctcaggtataaaatgacagtcttaatggttaaaggctggaggttggagctgccagaacactgctgaaattaaggggggaattctcagaatgaggaacccacaaatggtggatccctcatatctgtgtacgactgccttcaaaaccttggatgactcttaaatgtcatgcattgatggcagtgctcccgggagccaagcagttagcaacagctgaatggctaaaatgctgagcagagagtttagcaaccactggtttcactttcaaattctaccaagttagaggagtttgttcaataccttgagctatctattgaaacatcagaagaaccacaccttaagaataaagactatactagaactatggactatgacctaagaataaagaaaaaacagaaatatatgtgctttaacaaaacctaaaagcaagcctccacaacatcaagattattcttcagtaatttaactgcctattgcaataaaacccaacagttttcagaaaaagataatggaatctagagtctctattatctacaatgttcagtatgcaatcaaaaattactagacatgcaaacaagcaggaaaatgtgacctataatttaaaaaataaaacaatagaaacagacctgtaaatgaaccagatattgaaaatatcagacaaatattgtccaataactactataaatatcttaaaatttacaggaaagcacagatattataaggaagaaatggcatattttggaacagatacagaaacactaaaaattgaaatattttaacttgaaatacacaatacctaaagtggaaaattcagttgggtggtctatagactgaatgtttaggccatgcccctcaccgccaatttatatgttgaaacctaattcccaatgtgatggtatttggagatagggactttgagaggtaattaggtcatgagggcagagccttcatgtacaggcttagtacccttataaaagaaaccaccaaagactcacttccctttttgccatgtgagaactgctaaaagagaggcatgtatgaaccaggaagcagaacctcatcagacaccaaatctgccagcactctgatcttgaacttcccagcatccagaactgtgagaaataaatttatgttgtgtataagccaccgtacttgtatactattacactgtataagacaaaggtactttgtcatagcagcctgaaaggacaaagacagatgggcttaatagccaactgaacaatgcagaagaaaaaaaattagtaaacttaaagagaaaccaatagaaattgtccaaagtgaagcccagagagaggggaaaaaaaggattctgaaaaatattataatagagtctccatgaactgtgagacaatttaagtggtctaacaaatgtcctttggactccacaaaggcaaggagagagaaaaaacgaaaaagataggtaacatatttataagaataatagctgaatttttgaaaatgatgaaaaacaatttctagaaccaaaaaattcaggaacccttaagaataattacaggctgggtgcagtggctcacgcctgtaatcccagcacttgggagactgaggtgggtggatcacctgaggttaggagttcaagaccagcctgaccaacatggagaaaccctgtctaacaaaaatacaaaattagtcaggcatggtggcacatgcctgtaatcccagctactcagaaggttgagacaggaaaattgcttgaaaccaggaggtgaaggatgcagtgagccaagatagtgccattgcactccagtctgggcaacaagagagaaactctgcctaaaaaaaaaaaaaaaaaaaaaaaaggaataattacaaagaaaaccacagtttggcacatcataatcaaactattgacaaagataaggagaatatcttcaaaccagcccaggggtggagttggggcatacaatatgttcaaggaaacaataacagctgacttcccatcagaaataataaagaacagagagtgaagcaagatggcagaagagaagcctatagcattcatctcctctgctcccccaaacaccaaattttaacaactacctccatgtaggaaagcactgtcacaagaaccaaaaatcaggtaccagcttggccttagtggggtagagcaacaagcaggctcttagggtccctgagtcccggcctagggtcttggacagcatctctggacctgccctgggccacaggggagctcacggtcctgatgtgtgggtcttaggcttggcagcattcaccaccagctgacagaagagccctagggtggcctagcagaacccccttgtggactggtggaagtggaggctacaggaagaggttcctctgcctgtggaaaaggaagggaaggacggaaaggactttatattgtggtttgtacgccaatttagcttcagtcgaatagaatatcaggtaaattgataaggtttttgtctccaatgtctggctcctagacatcatcactggagatgtctgggtcctgaaggaatttgctgccctgaaggaaagggccttgggtgaggccagtgctgtgctggcttccagtctcactcagcactggccaagtggtggtggccataggggtgcttgcatcaccatatcctgagttccaggtggctcagcagagatagaatccttttgtttgtgagaaagtaaggcaaaagaacaagaatctgcctgataatccagagaattctttttgatcttatccaagaccacaaaggtagtacctctacaagtctgcaaaaaccacagtattattgggcttaagacccaagaaccttcaaattgctggaaagccttcccaagcacaagcacaaacaagcccagactgtgaagactacaatacatacctaactcttcaatgcccagacattgatgaaaatctacaagcatcaaccccatccaggaaaacatgacctcaccaactaaatgaggtaccagggactaatactggagaaacagagatatatgaccttttagaaagagaattcaaaatagctgttttaaagaaacagagaaaagcaagataacacagggaaggaattcagaattctatcagataaatttaacaaagagattgaaataattaaaaagaatcaagcagaaactctagaattgaaaaactgcaattcacatgctgaagaatgcatcagagtctcttaatagcagaattgacaaagcagaagaaagtgagcttgaagacaggctatttgaaaatacatagtcagagacaaaagaaagaataaaaaacaataaagcatacctacaagatctatgaaatagcctcaaaggagcaaatctaagatttatcggccttaaagaggaggtagagagagagagagagagagagagagagacaggggtagaaagtttacaaagggacaatatcagagaacttcccaaacctagggaaagataacaacattcaagtacaaaaaggttatcaaacatcaagcaaatttaacccaaaagtttttaaatgactcaaggcatttaataatcaaactcccaaaggtcaaggacaaataaaggatcctaaaagcagaaagagaaaagaaaaaaataacatacaatggagtttcaatacttctggcagcagacttttcagtagaaatcttataggacaagagagagtggaatgacatatgtaaagtgctgaagaaaataaactttcatcctagaaaggtatatccagcaaaaaaaaaaaaaaaaaaaaaaagttattttggcatgaaggagaaatgaagacctttacagaaaatcaaaaggtgagtgacttcatcaacatcagacctgtcctaccagaaatgctaaatggagttcttcaatctgaaagaaaagaatgttgatgggcaagaagaaatcatatgaaggttcaaaactccgtggtaataggaagcacacagaaaaccacagaatggtataacactgtcattgtgttatgtaaactactcttgatttagatagaaaaactaaatgatgaatcaatcaaaaataaaaactacaacttttcaagatatagtacagtaagacaaagagaaacaacagaaagataaaaatccaggagatcaagttaaagtgtagaattttattagttttcttatttgtgtgtttgtttatgcaatcagtgttagattgtcatcagtttaaaataacaggttataagatagtatttgaaaacgtcatagtaatctcaaatcaaagaacatacaatggatatgcaaaaaataaaaagcaagaaattaaatcatatcagcagagaaaatcaccttcactaaaagaaagacagggagaaaggaaagaaaagaagattgcaaaacaaccagaaaacaaataacaaaatggctggagtaagtcccaatggactaagctccccaatcaaaagacacagatggcttaatgaatgaaaaaacaatacccaatgatctgttgcctacaagaaatacactccacatataaagacacatatagactaaaaataaagggatggaaaaaatattccatgagaaaccaatatacttatatcagacagaatagattttaagacaaaaactgtaggaagcaacaaagaaggtcattacatagtgataaagtgtcaattcaccaggaggatataatgattgtaaatatacatgcacccaacactagagcaaccatatacaaagtaaatactattagcactaaagagaggtcgatcccaacatattaatagctggagacttcaacacccccactttcagcattggacagatctatcagacagaaaatcaacaaagaaacagtagactgaatctgcattatgaaacaaatggacctaatagatactaacagaacatttcatccaatggttgcagaatacacatttttctccttagcacagggatcattctcaagcatagaccatacataagatcacaaaacaagtcttaaaacattttttaaaaatgaaataatatcaagcatcttatcggaccacaatgaaataaaactagaaatcaataacaaaaggaattttggaaactatacaaacacacggaaattgaacaatatgctcttgaatgaccagtaagtcaatgaaaaagttaagaagaagactgaaaattgttttgaaacagatgataaaagaaatacaacataccaaaaacatacggatatatatagcaaaagcagtacaaagaggaaaatgtatagctataagtgtctatataaaaaaagaaaaacttcaaataaataacctcataaagcatcttaaagaactagaaaagcaagaccaaattgaatccaaaattagtataataaaagaaataataaacatcagagcagaaataaatgaatttgaaataaaactattcaaaaggtcaatgaaacaaaaagctgtttttttgtaaagataaacaaaatttacaaatcttggccaaactaagaaaaaagaagaacaaaataaataaaatcagagatgaaaaaggagacattacaattgatcctgcaagaaattcaaaggaacattagtggctactatgagcaactatatgccaataaattagaaaatctagaagaaatggataaattcctagacacgtacaagctaccaagattgaaccataaagaaatgcaaaagctgaacagactaatagaaagtaatgagattgacgtcataataaaaagtctcccagtaaagaaaagcccaggacccaatggcttcactgatgaattctaccaaacatttaaagaaggactaatatcaattctactcaaactgttctgaaaaatagagatggaaagaaagaatacttcaaaacttattctacaaggccagtgttaccctgataccagaaccaaacaaagacacattttaaaaaggagaactacagcccaatatctctgatgaatattgatgcaaaaatgttcaacaaaatacttgcaaactgaactcaacaagacattaaaaagattgttcatcatgaccaagtaggatttattccaggaatgcaaggatggttcaacatacataaatcaatcaatatggtacatcatatcaacagaatgagtacaaaaaccatatgaccatttcaattgatgctgaaaaagcatttgataaagttcagtatcacttcatgataaaaatcctaaaaaaactgggcatagagggaatataacatattaaaagtcacatatggcagacccacagctagtaccatacctaatagggaaaaactaaaagccctttcctcttagatctggaacacagtatggatgcccactttcactacttgctctagatgggatttccagtattatgttattcattataatactggaaatcctagctagagcaatcagacaagagaaagaaataagatccaaattggaaaggaagaagtcaaattatacttgtttgcagatgatatgatcttatatttggaaaaaaactagactccaccaaaaaactattagaactgataaacaaattcagtaaagttggctgagcacagtggctcatgcctctaattccagcattttgggaggccaaggtgagagagtcacttgaggctagaagttcaagatcagcctggacaacatagtgagaccccatctctacaaaatatggttttaaaaattatctgggcatggtagcacacccctgtagtcccagctactcaggagactgaggcaggaggagcacctgagcctgcactctagccttggcaacagagcaagaccctgtcccaaagaaaagaaaaaagaaaaacattcagtaaagttgcaggatacaaaatcaacatacaaacatcagtaggaattctatatgccaaaagtgaataatttgaaaagaaattaaaaaatgtaattctatttataatggccacaaataaaataaaatacctaggaattaatggcaaagaagtcaaagatctctacaacgcaaactataaaatgctgatgaaagaaactgaagaggacacacacacccacaaaaaaatgttatttcatattcatggattggaaaatcaatattgttaaaacagttataccacccaaagaaatctacagattcaatgcaatccctatcaaaatcccaatggcattcttcacagaaacaataaaacaattgtaaaatttatatggaatcacaaaagacccaaagtagccaaaactatcctgagggaaaaaaaaaaaaaaaagaggaattacattacctgacttcaaattatactgcagagctacagtaaccaaaacagcatggtactggcataaaacagacacatagaccaatggaacagaataaagaacccagaaataaatccacacacctacagtgaactcattttttacaaaggtgccaagaacatacattggggagaaggcattctctttaataaactatgctgggaaaactagatattcacattcagaaaaatgaaactagacccctatttttcaccatatacaaaaatcaaataaaaattgattaaatacttaaatctaagacctgaaactatgaaactactaaaagaaaacattgggaaaactctccaggacattggtctgggcaaaatttttgagtaataccccacaagcacaggcaaccaaagcaaaaatggacaaatgggattacatcaagttaaaaatcttctgcagagcaaagaggatacaatcaacaaaatgaagaaacaacaccaagaatagtttaaaatatttgccaactacccatatgacaagtaattaataactataatatataaggagttcaaacaactctataggaaaaaaatcctaataatccaattaaaaaacagaaaaaagatctgaatagacctttctcaaaaaaaagacatacaaatggcaaacaggcatatgaaaaagtgctcaacatcattgatcatcagagaaatgtaaattaatgagatatcatctcaccccagttaaaatggcttttatccaaaagacaggcaataacaaatactggcaaggatgtgaagaaaaggggacagacccttgtacacagttggtggaaatgtaagttagtacaactaaggagaagagtttagaagttcctcaaaaaactaaaaatagagccaccatatgatccagcaatttcactgctgggtatataccccagagaaaagaaattagtgcatcagagagatactcccgtgtttgttgcagcactgctcacaatagccaagatttggaatcaacctaagagaccatccacagatgaatggataatgaaactgtgttacttctacacaatggcgtaccattcagccatgaaaagaatgagatccagtcatttgcaacaacatagatgaactggagatcattatgttaagtgaaataagccaggtatggaaagacaaacatcatgtgttctcacttatttgtgggatctaaaaatcaaaacgattggagtcatggacatagagagtagaaggatggttaccagaaggtgggaagggtggtggggatagggagagacaggaatagttaatgggtacaaaaatatagaataagtaacagccagttttatacttgatagcacagagggattatagtcaataataacttgattgtatatttttaaacaactaaaagggtataattggattgtctacaacacaaaggataaatgtttgaggggatgatacccaatttccataatgtgattattattcattgcatgcctgtaccaaaatatctcacatacccaataagtatatacagtatgtacccacaacaattaaaaattataaaattttaaaaaaagaaataatagagatcataggacatctgaaacactatgtttaaagtaacaaaagggaaagaaagtgtcaacataaaattctatatccagtgaaaatatcctttaaaattgaaggtgaaataaagacatatgcagctaagaggaaggggagaaaaatctgtcacctgtaaacaataaatgctgaagagaaatgatgccagatggaaattcagatctaaaggaagaaattaaaagcactggaaatgataaacatgttggtaaatataaaattatttttttcttaatttattgaaaaaaccatatggacagatgttatttgacggtgcttctcaaggtgttcatccacctgtgactcaagcttcctactgttgctccaagtcttggaaattgttttgggtttttgttgtcgttgtttttgttgaggcagtgtctcgctcttttgcctaggctggagtgcagtagtatgatttatggctcactgcagccttgacttcccaggctcaggtgatcctcccacctcagcctcccaagtagctgggactacaggcacatgtcaccatgtccagattttgtttttaatatttggcagagatggggttttgccacattgcccaagctagtctcaaactcctgaactcaatcaatcttcccaccttggcctcccaaagtgctgggatgacaggcatgagccactgcacccagcctaagtcttgtacattgttatgtctgcctgctgttgattggatgaatatgttgaattgatagggacacaaactgtgggaatctgtgtgaatgcctctttttctgaggaaatgaaagtaaaagctgtttgcagatgccagtgctagggtatatcacagctcctcaaggacatcttgacagggcagagaccaaagacaacacagtgagggcttgctggagatggccacctgcaccacactggcggtgactccatggctaagggccggtaaacagagaaatctcaggagtggagacaagctgccttcatcgagggtttctggaatggattgtgcagggttattcattcagcactcactacacatgtactgaatacctactatgtggcaggcattgtgacgagtgttctacaggggtgaagatgtgaaacagtcacagtcctgtcttcatagtatgtaggggagatacagccacaaatgaatctaatatgagaaaattctaaagtaaacactcataaaaataaaaatgatagcaatagctaacaggaagtaaatccctatcatgaccagcactgcgctaagcactttatatgcacgaaatcatttgacatccacaaccccctgaaaggagaaactgccaaccccatttgcaccagggaggaaattgatgctcttgaagtttcaccagatagaaaatagtggagctggaattcgaacctaagtgcttgattctgaggcccagtttctgatcacgacagtgcaggagcaggtagggtttggtgggatctgaggatggagattgcttcttcccaggaggatcatgtaagcctgcatagagaaggggcacgttaaacctaaattctatcttctaaccttgaagatagaatatggacttgtacagactagcgctccatgaataagaaataagagctcaggagtgccagggcctcaaaggaggagcaggtagagtttggtgggatctgaagacagagattgcgttttcccaggaggatcatgtaagcctctgtggagaaggggcatgtgaacaggccttgaaggtagaatatggacttgtacagactaacatcccataaatgagaaataagagctcacgagtgccagggcacaaggagcagtactgtgttagtatgtgctgctgggtgctagggatatactgcacccagtgttgatggcacagggtctcaggactggatcagacatgatcccagcccagtagtttacatggggtcaggtaggtcctaactaaatccacaaaggagagagtggcaaattaatcttttgccttgactgtagccacttgtaaataaaaatacgaaggtaccctgtagtcccagttactcaggaggaggctgaagtgggaggatcacttgagcccaggaggtcgaggctgcagtgagctgtgatcatgccactgcactccagcctgggcaacagagcgagaccctgtctttaaaaggaattgttttttaaactatgaagacgtttttcttccctgctgtgaaaacaagatttgtggaatttgaataaacttgtcaaatataaacctagtctggcagggcctttcttcaccaaaaaaaaaaaaaaaaaatgactcagacaaaaacagaagaggcgaggactgagataaagaaaaagacagaaacctgaccaccattgtcacctgttacaaacaccagccactttggtcatcggtgctaaggccaagccatgtgctaatttctaattctgatgctttcatgtagacaaatctagtcacccaaggcagaaacgggaagccatctgagacactggccatttccacatcacgttaagcaccaagtcttatcactattggcaaattgaaaacaaaaaagattccatttttttcctatgtattcagacttctctgccactgttcggcccccgtatttctgagtgacatggcctccttagtaattttcttgcttctagtttatttccctcttactccaacctctctgcttctgccgagtaggcttccacaaatgtaaagcaatttccacctcctgttgaaagcccttcagcagcttctcactgcacagaaggtagattttatacataacctacgaggccctttgtgacctcactcctgcctgctgtccaagctcctcttcacccactacccctggattccagcactcctctggtgcccattgtgtgccctgctgtttcacagcatcatacaccgtgtgactcactgtaagcttcccaagaaagccttttgtacagtcagggttctctagagggacaggactaatagcatagaatatgaaagcaagtttattaaggagaattgactcacacgatcacaaggtgaagtcccacaataagctgtttgcaagctgaagagcaaggaagccagtccaagtcccaaaacctcaaaagtagggaagccgacagtgcagccgtctgtggccaaagacccgagagcccctgtcaaaccactggtgtaagcctgagtttgaaagctgaagaacttggagtcccatgttcaaaggcaggaagcatccagcacaggagaaagatgaaggccagaagactcagccagtctagtccttccacgttcctctgcctgcttttattctagcctcgctggcagctgatggtgcccacctggattgagggtgtgtctgcctctcacagtccactgactcaaatgttaatctcctttggcaacaccctcacagacacacccaggaacaatactttgcatctttcaatccaatcaatttgacactcaatattaaccatcacacctttccttcttgtgtccacctggaggccccagctctagcctcatcctccctgggaagctaccactggcatccccagtcccggggcttctggacctaatacctcagcccacaccatgacctggcacagccacaatacagcagctgggctgatgcttcctagataaatgagcgccttttgtcctttgcttttctttcctgtgcctaccctcgtctccccaccactatcacctatggcccctcccggcatcacgatcatttgcccagagttgcctcccatctgacagcctccgagaaagaagtccaggcaagcatgaagctctgaaggcacacacattccctccctctcattgggggtcaccttaatttgccaacactgattagtgtcaccacccacaagtgatagtaagggaggcattagcaggagcaccagtgacacttcttggcatcagctggggataacgctaccttgaaaagtgagcctgttgacacccaggaattgaatttccagatcctgctggggaaccatgcagagagcttctcacaaattctggaagccccaggtgagatgtgctactcgtcccatcagctgaaacctattcaactccgcagattctcaatgtgcaccagcaaggtgctaggtgtcaggtccccagctcctgctctcttggaacttccactcagagatgatgggatgtcaaccaagtagtgttgccaagaggactcaaaggaaaactcatgtgtgggatgttaataactactaatgaaagtgggtctttatttaaacatttaggaactactgcataaaaaatgaatggttttctttaatcttgagcttcttggaaccttgaaaatgacagtgattgccatgaagctcaacaagaagggtccagtttgcagccttctcctcctaacatgctgacacagaacccctgtgctgaggcagacccaccctcaatccaggtgggcaccatctggattccaaagaatccacatctttggatagcatttcaccaaatagactatagcaaatgttttaggccaggcacagtggctcacgcctgtaattccagcactttgggaggctgaggcaggcagatcacctgaagtcaggagttcatgaccagcctggccaatatggtgaaaccccatctctactaaaaatataaaaattagcgaggcatggaggaaggtgcctgtaatcccaggtattcgggaggctgaagcaagagaatcgctggaacccaggaggcggaggttgcagtgagccgagagtgtgccattgcactgcacactgcagcctgtgcggcaagaatgaaattctgtctaataaaaaaaaaaaaagaaagaaagaaggaaatgttacagattatttcaatgcagaatcccagtgcaccaattacagagcgggcccagagaggctaaagctggtgataggtggatttctgagacagcctctcagcaaatgggtgcagaagtagggtgttgggaggatatcatctgagctcagccaagaggcggaaagcattccagacctgtgtaacaacttgcacaaaagcttggaggtctgaaacactgccacagcactggagaactgcacatcattctgtatcgttggagtgtgaaatattaaggggtgcagagcagaagagaaaatgaacaccctgcaggggacagaccagaaagacctttgaaaccacctaaggggtttgagcttagctgttgctttgttgtatctgtttgcttagtggctaatgacattctttcatctgttctttcctccattcactccagcagcatttagtgagcatgtgtgcggtgcccagctctacagaaggaaggagtgcagggaggattcaggggaggctggagacccggcaggggccggaatctgtaagctccgcagatccacacagctcccttgaaagccattctgttccttgtgcccacgggggaggaagtgacccacggtgttcagacatctttgggcctgggatggagagatgaggccaccacagcctgtcacctcagccagagtcaaattaatgacatggatcattgtcactgagggcatgaccttttgaaataattgaaaggaaaccttgcctgagagaggagtcctaggaagacagaagtgaaaacaaagctggagatagacagtgctggcagcacccacctctgatgccctcagcccagccatgtggggatgacaggaatacatagctgctaaggcgagtgatttacggagcacataccaggagggtccagggtggtggcaagatgcaagccatgagccagggcagatcacctacccaggcagatgctacctgcaaacacaaatgtgggcacagagaggccagtggaggtgaaaaatctccttccctgctacccaggtgagtgccggcagagccacacggcggtcagccatggcctctccatcagctccctaatgagcttccagccagacaagctgaaaataacaggaccagaccaagtgagagctgggtcccgtcaggtcttcagcacatgcagccaacgtgcccagccgaacagcaggcgccaccagttcctttctgtcaatgcaacaacctccaggtgggggggcccttctcccacctcccatgtgtgaactgagaccccagaccctcaccctgtgcccagcaaccccaaggcacagagaattttgtctgtgtctcctgatttcaagggagaggcaataagctttgatcccttagtgcctctgggatttgagggttacctaacaggcagaaagaagtgaaagacccagcaagtaagagcggggcagctggtgattcccagagtgggttccaggagcacaggcctggagatgttccctccaaacaggcttccctgttgacagtaacactgcgcatgtcacattcattcatgagaagagttctgagccaaggaaacaggagacactcagaccctgaggggtggagggatgcggtacatccaagaagttctgacccatcaaagagttgctagaagggcccaagagtgtctcacaccctccacttgtctaactggcttccacccctcccacaccagcaagtacccttttcctggtagaaaaaaaaaaagcaattgagacgatgcagttcactgaggcttactggaaatgcataacaagggtttgtcctcctaggttgctgatcaggactaaatgttgctgtcccaagagcaataggttctctatactacaagttctgcttatgtgatgtctcagactggggttaaccacctcagctaattagtagaaaggcttccagccacctacacatgacctgtgatcctggaaggagaaaaacgtctgctgctgaaccaaagctccttcacccttctcattgccaaaaaacagcttcgcagtcacatgggaaatgtctctttggacttaggaacaatggcctccagcagcattttggaatctcacccatcagtaactagaggagcttctataaatctttgtagtgagaaaagttattgtagcttcagaattggatagctaggttggaagctgcagtttggccacaactggctgtgtgacctgggggcaagttcctctccaagcctgttttctcatctgcacagtaggaccatagctggagtttactgattcctgttccattgctctgtgcttaccagagctcatatatcttctcttccattttgctcctatgtttactatttttgctcctgcgatgtattgataactggccaccacataccggttccaaagagaatatttgtgtgagggttactgttggcctcatctggcaaagctttacaaggctccccactaggctgcaggtcttgtctcctccctggtcaccaatacaggacatggtcacctgtgcataagacattgggctgtgggtgaggcaggcagagaagccatgtcccagaggctgtgcatgacgactggccagatgcttctgtctggtttgggtggttttcttccttccctcacaggacagctggggtagaccatagatcccaaacctccctacgcagatttcatcctgaaacatttgctttccaagtaaagccttaacattcaagaagacagccctcagctcagagctggctctctgcctgaatttcctgttctctccctgtcggttttctgagatccacggcagttattctcaaaaaacctctgattgttcattcttctctccacgcaagttctgtggttctaaaaggggtttgggaattggcagcacggtgatacactaattcctgatggccagaccaagtcacctgctaggtttgatcagaagagctccacctcccatcccagcgccccagggtctccatggcatctgggcatctttttcctcttgtgccctagtttcactcttggaaacctcctctccataagttagacctaagcctgtcagtgtatccctgctttggaccacagaaatttgctcagcagtggacgtatcacgcaaccagagcccgtgcgacataatgaccttgtgctgatacatatgatggaattttaataaggggtagcagctgccctgccttgcccttagagcatctccttaaaagcacaacaggtaggccagaccctagagtcaggagttagattttacaatgcaaggtctccagtctccagatttcacaacacaaggtcacaggccttctgaccctgggactgtaggcacaggcctcggaaattgactcagcggtctctcgggaggtgtgcagaaggctgttacaaggcacatccattcgtctctcaaggagggaagagtgggcttcatttttcttctactttgctgtagaaagtgtgtgaaattcagcccagattgtgtagagtctcctgcaggctcctcgcatgtgtgtatctaatatgcatattcaggaataaatcacgtttcctgcctcatctatatgggtatgaggggagaggagtctttttgttggcaagactttttatttctccaacagccccgttgctggaaatgctggcattgagtctctcactctcctccagatttaaagctggagaaacgtgctgcagccatttctctgcccttagggaagaggctgcctgagaacaaggccaactccaaggaactgggccaacaacctgggaagaaggaagaggatcgggatgacttaaccccaatccctgggtccagccgtgcctgtctctggattttgccattgtacaagctgaaatgttcccttttcacttaagtaaattgggtacagtttcctagctcttgcaagagaaagcaccctcactggcttaatgcccaagtataagcatcttaaatgcttgtctaaatcttgaaacgcagctgtggtgtaatatacttctgagtcagaagggctatttaggcacagcctttcgctcttgccagagccccttacatgacgctgtcactggatagtggctcagcccatgcgtgctcacacccagtgtggaaattcgctgccgctaaggcaacccactctctctccacacagctctacctaccaagaggcccttactcatcccccactccaatgcttctccctcaagccattggttggccccccagagaacaagtgtggaccttttttccttaagggccctctcaatcaaagtcagctgtcatgtctctgcaagacagtatgctcccctctaggctcaatttcttgtcacttatgcgcctgatacacagtcatttcctacttaaaatcaaatcaataagtgagtagtgcttcctttaatgagggctaaagaacagaaatccagttttacctcattatggagctgatggcctcagcatcctacaagcgcatcagaactctgcctggcttctcgacaggcaattacctggaacaccaggttcaaggatggagtggaagatgatggaagagtgtgtttttgtgaggaggccagaagacactcatattcgttacagccccaggcacagagaggttctccggtccagtcctgcaggtgaactaaagatgcctccaggggctgtgctgaaaatggaccagcttgggcccagcttctctgtgcctcttcctagtaaagaggaagaagaaatcaaaaggtgttaactgatggagaacacaagctttggagtcagggaggctctatttactttccaactctgcctcttcctgtttgaactggagcgagatacttccctgtatcctcttcctcagcagggaaaatgaccacctgtctcaggtgtgtagatatctaagtcctcagacccatatgtgaggacatactagtggcagttgttacaataatatgattatggccaggcatgctggctcatgcctgtaatcccagcacttcggcaggccaaggcgggctgatcatttgagtccaggagttagagaccagcctggccaacatggtgaaacctctgtctctactgaaaatacaaaaattagccaggcatggtggtacatgcctgtaatcccagctactagggaggcttgggcggagagtctcttgaacccgggaggcagagcttccagtgagatcacgccactacactctggcctgggtgacagagtgagactccgtctcaaaaaaaaataataatttttaaaaatttacaattatttctgactttttgaagcttctggcctagtggtgtcccccttgtcgagtgagtctgctggttcccctgtgaatgaagtgctactggcaattcaaacggcttgcctgccgaagctctttacgtccctccaaagtcacatgctgatcagattattttattaaagaacagagttattgcaaaggagtgcagctattcacagaacacaggaaagcaagcagccggaccccagcttctcccttagttggcttgaaagttcgagtgccagtcttcctcccagcggggtgcactgtgtgggggcccaagaagcgtcctgccaggaagtgagaactgcaggtgagttcctgggagctgaggctttggggagctctggctcttcctgcctcactgtccacaatccttgggctaattctggatggcagagtagggtcaagaatgctagcatcaaaccttccctaatgtgggcagttgaagggaggtcaggagtgacaggaagtgaagtcagcaatgctgagcatcacctaggcaagaaacagggaggccttgtagaaactgtttggtgctgcaaacctgtgccccactgaggcattatggctcctcctccacgtggagtgtcttctctgagagtgcctcaaggtgcgaggggcagtgggaagattgcagagtcccaggtctgctgcttattaacctcgagacttcagcagtcaccgcacagcttccagacctcgggtgcccacttgtgaaatgggaaagctgggctaggccagtcattcacattttgtggctatcggccaggtccctggtgcccaggcatgcagccacctgccgagggtgagctggcacacaggcagcacctgtttctgtacctgacagggagtgtctcaacagcagatgactccaaagtcaaggcccgtagagtcaactcagattttgatatgactgctcggtccccagagcactttagaagagtgatttggataggtctatggatggacaaatgaaaatatctgagaaagatgctacttcatggggtcctttcctttgaagtgatcagaaatagcatagaaggctgggtgcggtggctcatgcctataatcccagcactttgggaggtcgaggcaggtgaatcacatgaggtcaggagtttgagaccagcctggccaacatggctaaaccttgtctctattaaaaatacaaaaattagctgggtgtggtgatgggcacctgtagttccagctactcgggaggctgaggcaggagaattgcttgaacctgggagatggcagttgcagtgatctgagatcacaccattgcactccagcctgggtgacagagcaagactctgtctcaagaaatagcatagaaggctttagcaggaccattgataacagcaatacctctgttttgaagagtataaccataatggaggcttccaggactgaagctgaagaagagctttccaacaccagttgatagactactgggtaatgtcatagttaatgttgctagagtggccattaaaataacataattatgctaagtagtttgaaaaaaaggagagagagagtacaatggaacacacttgtgacatgaactctgggtaattgtgctgagataatttatgccaataactcctcgcaaacccccgtcaagttgaatgactgtctgctgagggtctcgcccattaggtaatttgatggctggtttaaaaagaaaagtgataggataggattgtgtctgggctaaatacaaggtgaggctgaagggggcaaagtgcaaaacaccaatcagctgtgttctcatgtcagatcaggcctggctaacacattttggaactgttatagaacgaggatctacccctgcggttttctagaacatagcttgggttttctcctggtcacctcaagttcttcccttcaaaatcaaatgccttagaggtgccacaagggctgactggttcaatgagttgtgcagactgttccatgggcagctttttctcccttagtatatcaagagaattctcacagtgaactattttgtacaggggataactttcattaagaaaagcacatagtccagcattttgggaggccaaagttagagaattgcttgaagctaggagtttgagaccagcctgaacaacatagtgagacctccatctctacaaaactttttttttaagccaggcatgctggtgtacccctgtagtcccagctactttggaggctgagtcaggaagatcccttaggcccaggagttgaagactgcaatgagctatgattgtgccactgcactccagcctgggtgacagagcaagactgtatatatagatttatacatttttttgagatatggtatatatatacacacatatatatatatatatatatacacacacacacacacacacaaaatataaagattcgtttgtatgaaaaaaatgccagaataacatacagggaaatggtaagaatgtttatctttgggtaagatttttggtagtttttctgtgtacttttctgtgctttcaaggttcattatgtttgaattagaaaagctatttaaaatgtcatctttcttgaagttttctacacttaatctctatcataactctatcttctcccacaactgtgaagagtttaattctcaataaaagaaaaatattagatcttaaatgatcttcccttgttccaccctcaaatcaatcactgatcaatttcccagctccttctcaagttcagtaaataaaaggaaactgtccaaaggtaaagtgcccgccatctgcatcaacagcctttactgctggaatgttccaccctttcactagtctaccctctcattgtgttccttcctcccccaggaagtgccagttcctcagcacagccctgcagcatttcctggcagctctgccagcctccttacctcacactgctatgagagccacaccatttctcatcgatactgctttctacccacccactcaactcagcagtgagctctctcttccaggaaaaaccatctcatccaagtaagtagtgagggcaaatgacaaatacacccttttccttaaagaatgtgattcacacgggtcatcacgctgagcatcatcgactcctggaatgcaatagtgatggtggtagctggaaggatggtattaagacttacctttggccctctgcctcctggttttcttacactataatctttataatccataatatcctgtccatcaaacaacctgcaacccttttctaagaatctgaaagtcacttctctggccgggcgcggtgtctcacgcctgtaatactagcactttgggaggctgaggtgggcagatcatttgaggtcggagttccagaccagccttgccaatatggtgaaacgctgtctctactaaaaatacaaaaattagccaggcatagtggtgggcgcctgtaatcccagctactcgggggactaaggcatgagaatcgattgaatccgggaggcagatgctgcagtgagccaagatcgagccactgtaatccagcctgggcaacagagtgagactcggcctcaaaaaataaaaataaaataaaaagtgacttctctgcttcttccaaagcaagagagagtccccactggtcactggataaacttgtgtgtttccgagcgttttggatcagatttattggcacttactggaagcaaaaaagagcctggagatagctctattttatttccatgatacctagtccccagttatatgacaactctagactgagcccagcatgtagaagccagaaactcattgaggtttttttatccaaattatttgctataaacatgagcttcctttaggccagagattcacaaatttggcttcacattagaattggttgggggctataaaaaatctccatgcccaggttgtttccatcccatttaaatcggtttaaacaacgattaatgcctggaggtgggtccaggcatagtttttaaagcttagcagttgattgcaacgtctaccaagtttgaaacactggcccgaggctgtggttttcaatgatgcctgaacattggaatcacctggagatgttttaaaagttctgactggcaggaatgcctgagactaattaagtagcaggctctgggagtggatcaggtgtcagtggtttttgaagatcctcagatgatgctaatgagcaaacaaatttgagaaccgctcccctagacaaatcccttcatgaaaagcacaaggaaacctcttggtggtgtccctcacttcctgaaaatagtaaaattggctccttccctcagactaccttccctgcctattagcaaatgtccattcttcccattgagcccattgaacttacttcctccagagcaattcatattcaatgtcgtccactctcaccttctgcaagtaaataacttcccatcccacatggctctgcctctctctatggctctgtaattcctgcaatctttcctggcaactggactgtttttggcaaacacacagacagatacacagcctagagagaatgtcacactttgacacttgagacttgttcatcttggaaaggtgcaataaatatctgacaataatgtaaaggaagaacacgtgctaaatatatatatccttacctgggcaggcagcagagtgaagaagggggcggggaaagggggcttcaattggataggtaatattttattcttgaaaatctgaagcaaaatttaacaaactgttagcatttgttaaatttgaatggtaggttcatgggtgtttatcattcttgtgcttttttgtatgcttgaaatatttcattaaaaatttaagagtctggtcgggcacagtggctcacacctatcatcccagcactttgggaagctgaggtgggtggatcacctgaggtcaggagttcgagaccagcatggccaacatggtgaaaccccatctctactaaaaaaacaaaaattagccaggcatggtggtgggcacctgtaatcccagctactcgggaggctgaggcaggagaatcacttgaaactgggaggcagaagttgcagtgagctgagatcatgccattgcactccagcctgggcaacagagcaagattctgtctcaaaaaaaaaaaattaagaatcataaaaatgttttctaaaagctgttctctctatacacagaggatatttatcctacacaccagttacagacaatagaagcaagtttactgtttcaattttcaacagcgttgggatttgtttttgtttttagtgagttgagtggttctagattggcattgaacaatgtggtagccactgttcatgtgtgtggctgtttgaattaacactaaaataacatgtaaaattcatttattcagatgcactagccatgtttcaactgctcaatactggcacggattgtagaacatttccttcattacagacagttctattggatagctctggtctagataatacataattacgtaacaagatgcaaatgacttttctacaattagtctcctgcttccctttgtattggcttgaactaaagccatctgtgacttagaagttatgagtgacacaagtaaataaatggtaagtctattgtttttagtctttctggaaaacatttactaaactcaaaatcactgaacccacatatcaagaactgcacatttatagcacttttgtgtatagatggatatctagggctaatatacaaagccttgaccactgacaaatactgggaagtagctgtctaatattaattaataggcgggaccaactgatgttcaaagttgtcagtaggtcagttcaaatagtaggtcaggaagaatgtctgcccagatagtcaggacaatataatttcaagcttttcaaattaccaaacgaaacaggttgctacagcaggtaaaataacactaaatctgtggaaagaaaagccctacttcccacctgcccccaaccctgcgctcctgctccattctaacagcacagccacgcacgttcacactctgctcatgccaacgtagtaaagcagcaatatagacatacagggcatttttgttttttaccaaagagaactatgttacacacttcgccatttgagctttttcacttagcaatatgtcatagtagacctccttatgcgtctgtagatatgaatagaactttttccccaatctctttctgcatatgcattgaaattcatacacatatattccacatacatagatatatatttctgaacatatacttatatatgtacacattatataattttataaaattatacagtatagttttttgtaatttttataattttcttgtaaaattagtctgtataagcatatattcataaatatattcatatatatatgaatataccattcataaatatattcatatatatacacatatatatacacacacatatatatacatatacatatatatatatatatacacacacacacatatatatatatatatacacacaccaatataccattcatgccgggcaggggcaggaggcaggcagcggtgttttcatgcattttctgtgatagctagcttgcgtcttttgtacctactctcttccctggcccttcccccaccagaaccatctcaatcccagatcatttacgttagcaagatctagtttcttccacatgttttccatataaatacgatcatatacctattcatataatcacaaacaatgactttttttttttgagacagagtctcgctctgttgcccaggctggagtgcaatgctgcgatctcagctcactgcaacctctgcctcccaggttcaagcaattctcctgcctcagcctcctgagtagctgggactacaagcatgcgccaccagctaatttttgtatttttagtagagatgaggtttcaccatgttggccatgctggtctcgaactcccgacttcatgatccactcacctcggcctcccaaagggctgggattacaggcatgagccattgcacctggcctacaacaacttcttattgttccctttatgtcattgtcacttagtttgggaccactgtaatttcaccaaagcaaacatcttttttttttttttttttttgagatggagtctcactctgtcgtccaggctggagtgcagtggcacaatctctgcacactgcaagcttcgcctcccaggttaacgccattctcctgcctcagcctcccaagtagctgaggctacaggtgcccgccaccacacctggctaattttttgtatttttagtagagacggggtttcgctgtgttagccaggatggtctcgatctcctgacctcgtgatctgcccgcctcagcctcccaaagtgctgggattacaggcgtgagccaccacgcccggccacaaacatctttttacattcatattgggggaaatttggccagatatcaggcaaaattcacccccaatatttcacgtagtttcttttctattttccctaagcattggatggtttgagaaataaagagacagagtacaaaagagagaaattttaaagctgtgcatccagctgagacatcacatgtcggtaggttctgtgacgccccctgagccgtaaaaccagcaagtttttattagggattttcaaaaggggagggagtgtatgaatagggtgtgggtcacagagatcacgtgcttcacaaggtaatagaatatcacaaggcaaatggaggcagggcgagatcacaggaccacaggaccacaggactggggcaaaattaaaattgctaatgaagtttcaggcaccattgtcattgataacatcttatcaggagacagggtctgaccaaaaatttattaggtgggaatttccttgtcctaataagcctgggagtgctatgagagactggggcttatttcatccctacagtttcgaccatagaagacggccacacccaagggggccattttagaggcccaccctcagaggtgcattctctttctcagggatgttccttgctgagaaaaggaattcagtgatatttctcccatttgcttttgaaagaagagaaatatggctctgttccacccggctcaccggcagtcagagtttatctctcttgttccctaaacattgctgttatcctgttcttttttcaaggtgcccatatttcatattgttcaaacacacatgctctacaatttgtgcagttaacgcgatcatcacggggtcctgaggtgacatacatcctcctcagtttacgagatgacaggattaagagattaaagtaaagacaggcataggaaatcacaagggtattgattggggaagtgataagtgtccatgaaatcttcacaatttacgttcagagactgcagtaaagacaggcataagaaattataaaagtattaattcggggaaatgtccatgaaatcttcacaatccatgttcttctgccatggcttcagccggtccctccgttcggggtccctgacttcccacaacacattcacttttccagacttctgtttttatttctatggagagtgtcagaagaggaactgctgggccaatgggagtttatttttctttgtttttggaaaacagtctggagaagtgcattaaaactttctcctatttatgccagcaatgtgcaagagtatcattctctcacacttgttcaacagcaaaagatgctgttactcttggaagttctgcccatctgatggatgtaaagtgacacctcattgccattgtgttgactttgacaatgacaagatctcatacctactcatctattaggcactcagattcacttttttctaatgagggtatttcacctacattttttcctacagttttgtccttttcttgtcaatttataagatctctctatgtatgttatagataccaactcttcattgggcttagaatttttattttacaaatctattttcatctgatttgactagtatcttttgaaattcaagattttaaaaaatacaaataggcctatcttttctgctataggttctgtttgttttgttttttgtttgtttggtttttttgagatggagtctcactctgtcacccaggctggagggcagtggcgccatctcggctcactacaacctccacctcctgggttcaagcaattctctgcctcagcctcccgagtagctgggattacaggcatcctctgccacgcccagctaattttttttttattttatttttagtagagatgaggtttcaccatgttggccagactggtcttgaactcctgacttcaggtgatccactggcctcagcctcccaaagtgctgggattacaggtgtgagccaccatgcctggcctctgctataggttttaagtgtcctttcatgattaagaaggtcctctccccatttaaactacatgtacagttcctaaaatttttccttaaaaattttttttacatgcatctttaatcccactagagtttatttttaagcatgataggagctggggtccatctctgttttcttccaaatgaatagtaggcgttgccagcactgtttattaaataaaccaatcttctcccactgaattgaatcctgtctttcttgtattaaattcttgtagcttgaaatctcattcttgatagtctattttgtccactgacccatctgtcctcatgccaatgtcatattaactacaataattacactgtagtttctcaaatctttattcttctgtttcatactttccttggatatttttggatatttattttatataagctttatgatcattttatcctaaacaaattggatcaaaacaaaatgctgtatagagtctaattggaagtttattattaataaatgtatgttaatttgaggaaaagacttttttttttaagtgaaagcaaagcaagcttattagaacaacagaatacagaaaaatgtctgctccatagacagggcagggtaccccacaggcagagtacctggaaaattttttttttttttgagacagagtctcgctctgttgcccaggctggagtgcagtggcatgatcttggcccattgcaacctctgtctcctgggttcaagcaattctcctgccttagcctcctgtgtagctgagattacagccacccaccaccaagcccagctaatttttgtatttttagtagagacagggtttcaccatgttgcccaggctggtctcgaacctctgacctcaagtgatctgccctcctcacctgaggtcaggagttcaagaccagcctgaccaacatggtgaaaccccatctctacaaagaatacaaaaaattagccaggcgtggtggtgggtgcctgtaatccgaactactagggaggctaaggcaggagaatcgcttgaacctgggagacagagattgtggtgagccgagatcatgccactgcactccagcctgggcgacagagtaagactgcctctaaataaataaataaataaataaataaataaataaataaataaataaaatatactcctctattttaattatttcctatttatattagggatagcttttccacatctattgttgtctttatttttccttctttgttcatttaatagacagtgttgataccaccttgcattcctagaataaatctcaaagtttattattcttttgcagcattattagacttcttttactagtattttatttagaaaatttcattaattcagtaaatgatactgatttttttgatatttaatgtcaggttttaatattaaatttacattaaactcacaaaatgaattgttggagcattctatagaatgctatggattgaatatttgtcgcctccaaaatttatgttgaaagttaatccccagtgtggcagtattgacagctggggccttaaagaggtgattaggtccattcacaaagtaatgaattaatgggttatcacagaagtagattaagtggttttataagaggatagacgccagggctagcatgctcagccccctcatcaggtgaccaggtgatgccctgtaccaccttgggactctgctgagagtccccagcagcaagaaggccctcaccaaatgcagccccttcacccttgaacttcttagcctgccatggacatcacctgggaaagtgttagaacacagaatctcaggccctattccagacctacagaatcggaatatgcatcattaacaagatctccaggtaaattgcacgcacagtaaaattggaaaagctctgacctgaacgagctggtagtttaaattggaattatcttttctttaatgtgtcatatagaactcagctatgaagtcattcagtcatggtaactttttatacttaatctatgctaattggtatgtttaagttttctacttcttgggctaattttggcattttatattttcgctaagaagtcatctgtatcccctggtttttacaactttgttactatggagttgcatgtttttattattttaatttcttccatcaagtgaggatggctggctcttcattttatatatttttgctttgcctcatttttctcgttatcaagctttacaaaaagccttatatattttcttgatcatttcaaagaaccagcttttacagccaattagtagtaattcttcaaagctaacaggagggggacactacaatgtgaaccactgtcatggatgaattcagctttgctttccattaacatcaaaactatgtacacatgcaaatctgaacttccaggggccaaagtattatgagaatgcaggattaataccaacctttgattcagaatcgcattctgagtagggtctacctccacctaagtggcctttctgtatacctaatcacattctaaatgccatttactgcctcgttaaataatgctttgagcatttgtatcttgttttacagttgatataccttttctacccactatttcatttgaaatttatatttaaaatggtataatagataatccgttactaagaggaacactgcctctaacctgattttcatgtactgagatcaactggggccccaggaatgccttgtctctccaaagggctgaaagggaccacagcagagtgtgtcttgaggagagagctaagaaagcaagtattccctcagataaagcaagaggcacgagttaaaattttagccatgccccaatgcaggaaatggcagatttcagatactcaatctagacaggcctattttgtgaaatgcattagctctcctctcccttccattaagaaaccaaggttttgtttgcccttttaaaaatgtatgaaaacctattacttagatactttgatttcttacctttgcaaatattctaataaaataaggatttcaaaagccagatgacggttaagtttttgcactcaaattgatccaagtttgggataatagctgcaaaaatataaagtgtagtttattgaatttaggattttcacttcactgatagaccagtcttaggttgatcattatggaagagttattacagagatattgctgaagccctccacaaagttaactttaatcttgtgccacagaccagagatttccgatctataataatctatttcataagcactcacagaagcaagcaattgaatagtcttccttttgtggtgtatttaggtcttctttaagtatctggactaaaaaccatcttaacttcatgttcctggcagtactgtgtttgggacattgttaaactccaataaatagtgctgagtactgaaaaggagaaaatcatcctgaatccttcctcagaagagaattgatcagttcacctgcttgataatatttttcctctctaatcaaaatgttcccctcctaaatcccaggatggaaaatgagtaagacagataaaatggtaaaattaaatgaaatgacatccattgcatttacaagttttgaaaataaaatactaaaggacagactttttgacactgaagtcttacataggcagaacattcattacgaaacaaacataactaaagtaaaatctcagtttttaagatcctgaattcattatttatgcttttcaactttttcttatggggatggtttaaatttaaatccaaaatatactgtaatatctcctctgacctcaagtcctggaaagataaaatacactgatttttgttgttgttgttgttagacctgatgtttccaaaatactctttggaaaatcttcctttcaaatgccactcagaaattcatttttttttttttttttcatttggagcatgcaactccatggctcagtagttgccatgggcctcagccttcagtctggcggtggaggggagacaaaccaggaacgtgagctttacaaaagaggttaatataaataccacaatggatatttcctggttattttggaaaaacttactgagaaagggcctgtgagaaaaggaaggcttcctgcagggcactgcacctaagcagataggcaggcagtggatgaaatagctaaaataaagataagaagggacagcttgggaaaagactgaaagaaaactacaaagaatataggttacaagaaaattctgttactagagcaaggggtttaccgatgggatgcaggtgaggacttgtataaggagttttgacatataccttgacacatactaatgtgctacttcctaaaacaaccctgagcgggtattatttttcagatgaaggaagaggaatggattgagtaatttatgtcaggtcacacatctaggaaatggcagagccagtactggaatccaaaaccaatgtcatattcttaacctccacactacttggcagctacatggaggacaaattttatggggacagaattgggggaaagatctatctggaattttactgcagtagactaggcaagacttaacaaggcctcaattaaaacactacagtataaaatggggatcagactataggctctggactcgagactccctcagctaaaataaaagttttggctcaacaaacctaacaggtatggttgtagaaaagaaactttggtgtgcctcagtttccccatctgtaaactagaaatagcaacactacctgacattaacctcagattttacagattaagagagaccatatacctaatgtacacttagcctagtggtcagtaatgggtgctcaaaaagttggccattattagaatgctacagatgacagatacagtaatggtcttgttaagagtaaattagcaggccggacgcagtgactcaggcctgtaatcccagcattttgggaggccgaggcaggtggattccctgagctcaggagtttgagaccagcctgggcaacacggtgacaccccgtctctacaaaaatacaacatattaaccaggtgtggcatcgtgtgcctgcaatcccagctacttaggaggctgacaggagaatcacttgaacctgggaggtggaggttgcagtgagccaagatcttgccattgcactgcagcctgggcaacactgagactccatctcaaaaaaaaagaaaaacaaagagtagattggcagaactaggggactgatttggggcaaagtggagaggagataatggatggaaaggaggcagggaaaactaacaggtttttcgcctggcgggtagttaacaaggtcgatggagaggcaactgactaaaatagagaagctggttcattggaaacagagatgacatcttttcctttcagacagtttgagtttaaggtgtcaacaggacatccaaacatatatgcccagtaagcacatgaatatgaaactcagggaagtggttgtggggagtcaccagcaaataggtggtgataaagtgtgttagaacagtgggctaaggataacagtccataaaatataaacattattttgggttaatatacaaaatgcaatgaaattcaaacgacatgaaaatacagaaaatgaaatttagtactgtgagaatgaagaattacttctgatatttaaatagtatgttcctacagtttagaaaaatgagggtactaaagcacattttgatccagtcaggacaaatgccctctatacactcagattgagtcaaagtttttacaaaggtatgctcagaaagaccaaagaaaatttgatgttatctttaacaaataatgcaacattttcaaaaaggccatttttataacactttttaaagcataatgaaaacacttggctctcaagattgtcccaagaattatccccaataaaatgcagtaggttaatgatctgatgtcagggtgctagctggtcaggtttattctgtaagtaattttctcctactatctaggattttgttttcacagaatggtaaaaatgttaacacaggtctgccgtatccattcagcaaaacagcatgaagtgacttgacttgtcctgtcacttgtggaacaaagccttctttaaaaactaaatggtctactacaatttaacagcatcccaccatcaaactctaaatatgaaagatgaagtaagcagccaccaaatatagcaattccggcactaagtgagtacctagagacctgcaaacttcctacttctgtcctccactgccatgtagaatttcaaggtatcacttcagggtgggaggtgatataggttatcagtatttctctatagggagggggtgctgttgacatttttggcagcacaggttttttagtgtgtggacctgtgttcccctcacaactcaatgtttcacattccaactctgccaccaacccttcctccaacccccaatccgaagagtgcctccactatctagagacacagaatataaaatacttctgtgtcccaccaattatcacacatgctaatttcatttctagaatggtaaaaatgaagcaaagactagtatctactcataagcatagaaagtttgacattttcttttttctgtcaacacctagctattaacatcaaaggctggaatcctggatggtcagttccctttgggcagacccaacctaaccatttttgccattttaaaaaagtgtacatgagattatcaggtagactcagtaaagcacgactggtccacctctaaacagcaaagacaaacacatcaaaaagtgactgtgattctcaaaggacaaagcccactcccaactcccaggggaaaatggaccttagtcttgtttcacctgtgtaattggaggcagaataggatgtgaattccgatgtgctctgcgtctggttccacaccatcttacagtgaaaagtgctgagtgactgtaaacccaacaggaaaaaacattcaaagtgtcatcactacagaaacaaacccagcaggaccacttctgcatgcaggcagtattaggtctcagatgctccctttctgcctcctgatagagtggatgcaggaactttggggacatgatgaaccacacacaaaatgaacgaaatggcagagcactctcattttggaaagtttctctcaggtaatatcccatcactgcctattaagactaaaggattaagtactaatttacactcataagggactaataaaatttcctggcctgtcacttaaggagaaaaaccagcagaccagacgtgaagataaaccctcagagctactaatgcctcattcaggactctttcccacagattagtgttgagattatcacacggcttacacagtagggaggaaatgcatagccaggactcttaccaagtccggtaaataaggaatacctagatactactgtttctgtcaatgccatagacacttagatgacccgttaattttacttcatcccaacaatgaccgtgcagaatctgcgtccctgacgcaaagcaggaagcaaatatttgggcaagaaaataaagtcagttacagatttcacaagtatcttgtacaccagtctgtaatttttaattagaattagctaaaagacattgtacctttcgcgtgtatgactgagcataacagtgcttaacagtgtctttattaagtgaatgcctgaaagtattcaacattaaattcaatttatttcacattaatgtttgcaaatacatcatcaattcttacatatttcaaatcaacttcaagtacagaaggcttcctctcaaataagtctcctgaggtgacataaagactgaaagaagcctatgacttgagtccaagtctcttaaccaacaatcaccatatcgtcactggtgaactcatacgtggggacttcaaggttgagaggagcaggacccaatctgatcctgccagatgcatcatagtgtgacccatggcaagggcagtaataaccaccaaaatctcctgcatttgcaatgggtacacagccaagatgagtgcaaacacctatcaggataacccattcaggtttctttactcgatctagatcatgctgtgggtccctcaactgtgataattcaactgcagcttcctgctcaatttccttctgggttctatgacgcacaaacaggggtttgcctctccatttgaaagccatgttcttgccttctggaatatcggataacttgatttcgattttcgccagggccaacacatcagcagaagcactcatgctggaaacgaactgggtgacggcattcttggcagcatatgcgacacccacagtagttactccagttaccaaataggagaaacctttcctagcctcgctgctttctcttgaagacttcgtactatctaaaacttcaaggcggcggtattcagagaagtcaggcaccttgatgtctgtgtgggaataacaaacagaagcagggactgcaagacaaacagaaggttaaaaaacacaattagatgagtatcccgaagggagtatatatcaggaaatagccctttatggattcacaggtaaaaaatcaaattctaaaaatgtgaaatatggcactcactgggtctcagaaatagtcaaattggcggtgctagcatataaaatcttaaaaatgaaatgaagtgaaccaccacctatcatactggtatgaaatcacaagatactatttgtaaattgagctccccctagttggttgaacattgctgattcaggattcacaacacctcagtgcatcatgctaaaaacgttaaacagcaaaataaacagtaataactcaaagtttccgaaaattcaactgccaagacttactatataaatcatgctaaatacctcccatactctctggattagaaggacaccctaaaactcatctagtccacacagtaagttgacgtgtgatcaccttattaaggcaaatgtctgccccttatagtccaatctatgttctcggaaaaaactgttaattcataaaataataatgatataataaacattctgtgaactgtataactctgctgcagaaaaattagcgtttctattttatactctagtgtataaattagtattactttaacttaaaaccactaataggcagagaaggacatccttatcagagctctcaaaataaaatgaaaactgcaaaagaactaattatttcaatttagcaagggaaaaaaagggcaaaattttcatatctccccctcttcagtaaagggcaatagttactgtaaaagtaggggtattatcttcccttttcactgctgtagttctctcaactggggcacttctagtctaggccataaaagagctcaaatgaatgttaaacaaataattactatgtagtactttgggagcaaggagtttctttggtagtttaaaaaacaaaaacaagacacagttacatccctctctccaatactatttttaaatatctgaccaaaaaaaaattttacctagtaccacttttaggtatgtttcaggaagcaaacctctttgcaaattgtatattcatcttaagaaatttgccacaaagtttcctttttaaaaaaggggacactaaaaattcctcttttagaaaatgtgtatccaaaataaagatcttttatgatgcatttttattgtaataaactgcaattctaccttgctctactaggatatcatcctaatatactgtacttccttgagtagtcaaacattacaatatggaatacctgaactgcttttcacatgattctcaaggtcaataactttatggaagccagaagtattcaaacaataatgaaacctaccaaaatcactctatgtgcttttctgactaaatcatttcctggagaagaccaggacacagataatggcaacttgagactcacatcccagaatctgtggagtcaaagtgacattacatcctatactactactctaacaaataaatgctaacctgccagtatatactggcatttggaattaagcataaattacttgctcctagcactacctgggattacagaaaagatgagcttcctccctaaaagataaaggaataaaaagttcatacttctacattaaaaacagtatccacaacccttaacagtatacaaggaaatgtacaagaaaactcaataaaatggctttgcccttctcattcagagatttggtggcaaaagtctcctcccactctatctagctggttacactttagtaggctacaccaccaagaatcctttcggaaattaaactgccctgttgcaaaaatcattctccaaatatttacatgagctgcattaggtctgactttcagtaagatgctagatttaattctaacctaaagcaaaatcaaatacttaaaggagaaaatttaaggaattttaacaaaacaagttttattttaaggttgagctccaatgcgccttggaaatctgcatgaaaatagtacaaccttcctctccaattcaagaatcttctccagatccaacccctccactcccataagccatcctgccatgaaccatctagacagactataatgtgaacttaaattacaggctgaaatgattacagaaaaggtttttgccttatggttctacattatttgcctgtttctaaaaatagtttctctaagtcaggtaaacctccaattttttttttattatactttaagttttagggtacatgtgcacaatgtgcaggttagttacatatgtatacatgtgccatgctggtgtgctgcacccattgactcatcatttagcattaggtatatctcccaatgctatccctccccctccccccaccccacaacagtccccagagtgtgatgttccccttcctgtgtccatgtgttctcattgttcaattcccacctatgagtgagaacatgcagtgtttgttttttgtccttgcgacagtttacttagaatgatgatttccaatttcatccatgtccctacaaaggacatgaactcatcattttttatggctgcatagtattccacggtgtatatgtgccacattttcttaatccggtctatcattgttggacatttggattggttccaagtctttgctattgtgaatagtgccccaataaacatacatgtaaatgtgtctttatagcagcatgatttatagtcttttgggtatatacccagtaatgggatggctgggtcaaatggtatttctagttctagatccctgaggaatctccacactgacttccacaatggttgaactagtttacagtcccaccaacagtgtaaaagtgttcctatttctccacatcctctccagcacctgttgtttcctgactttttaatgactgccattctaactggtgtgagatggtatctcattgtggtttacaggcaacctaaaaattgggagaaaatttttgcaacctactcatctgacaaagggctaatatccagaatctacaatgaactcaaacaaatttacaagaaaaaaacaaacaaccccatcaaaaagtgggcgaaggacatgaacagacacttctcaaaagaagacatttatgcagccaaaaaacacatgaaaaaatgctcagcatcactggccatcagagaaatgtaagcctccaattttttgaagaaactttagcaacacgacgaattccaaagatgcttttcttttgctattgaaatgttctccttccttccttctcacctccaggtcccaaggatgggctagggtactctacacctgccatggacagtttcttcaaaacccactgatgctccttaacaaatattcattcacaaatactttgcactaactgtatacaaaatccgacgttgtgaaagatagaaaaataaagaagatattaccttctctatgcccttaagcccaagggtggaggagttaccaataaacacaatacagagtgtaaagtgtatgtgctacagagacagacaaatcagcaaataaaaactttattcacctgatccttaactgagattgaaaagatgggtaaggaaaacatatggacatgtagcaacttagtggaaggaccatgaagaaagtgcagagcccagggtgaatgaagacagagtaaaaagaaaagtggcgggcaatttggttagcgtgtaggggaagagtcacaaacagctatcagtggagccaggctggtaacagaatgaaacacgcagacctggtaaagactgtgacaaactggagaagaccacttgctccaactgcgggggcggccactacacagcacactatggaattttcccaagtagaaactagatcccagtattaccggcttccagcattttaagagatgccattagtcttcccagtttttttgaaaactacacagcctgcagacacactgcccacaggctgccatttctctatctccgatacagggccaagtaaagatggaaggcgaggcaaagaagataaacggggatctaaggacagagggtgtggaatagcccctgcgaagagctcagtggctacgacaattcgtcttgtcaaatccctgctaccacatgtccacaccacggatcctggtgcgagtcattctacctcgtctgttttctcatctgtaaaatgtaaatgtcgtcaatctctgcccgtccttgacgactgattatgttgtgacactacactgtaactgaccttgtgtatgttttttttgttttttttttggtgggggggtgatgaaggggaaggacatgaagggatcggtagtggtgagaagaccaacttcccaaatattagtaagtttccatttcttaagcatgtaagtgcccaaactgtgctaacggctttacgtagaattcctccacctaagcctcacgacacccctacaaaattgataaagatatgaatccatttcacaggaagtacgtttagaaactcgcccaaggtcaaacgacctgcaagcaacaaaacccctcagaggtggctggaacagcgggactacagagctcgtgaactcggccgaggaggaaccaggcgaagccggcggacgcgagtccaggccggccaccagaaagacgccccgagcccgggggccaggcccagagttgcggaggccgcccagcccgacctgattcaggctccgctcgcgcgcccgcggccgctccctgctgggggccggaggagcgggcaccgagagacccccagccctgctcgcggccctcgccccggctcaccattgaggcccacggaggcgaccaaaggccggcgcacggcctggccgctcagcgactcccggctgaggaagggccgcttcaggtccaacacaggctgctccggggtggcgggcaccgtggcctgcaccaagggccgcagcgcgcccgccaccccgcgggacgtggccgacaggacgggcgcgaacgggcctgagcgggatgctaccgacaacatggcgacagccgctccaaccgccaagccggtcacagggacgaccttccaaccacggcgcaggcgcgaggaggcgcgggacgcgtgacgacagcgcgccgccggaaaggaaattctgcagtcctgcagggcggggcaaacttggagaggcgctgcgtcgggggacggggctacaagccgtcgctgggggcggggcttgcggcccacctgtaggtcccggtgccacctcgtcagtgtcccgagagatccccagaagaacgagagggctgaacaggggaccccactgacgtccggtgggccgactttacgatcctttagggtaaaaatttcatctaggaagacctagagataacaataaacgattatagtttaacttaggatggtaatatatctcaactacgacgaagtccagcacatagtaatcgctatgtgtttactatgatgatttttattatcttcatctaacaacaacaacaacaaaaaggccagaggcatctgtgcaaagctcgataatgctaatggattatgtttattaagtattcactgtgtatttggttttgcgttttattatacctacgttctttcatttgttatcaaggtctctatgaagtcagagctattactatcagcattttacccatgaagaaaccgaggtttagagagattcttttccaggaactggatagccagcaagatgtgaagcagggtaatctgtctcctgagtctatgctcttcagtgccaccactgtttcccaaagtaggattttagaattttagaggatgcacagagctcgctcattcatgttccatcacatagtgagaaagttttgttttcttttgttttgtttttcaatcctgattgcaccaatgagaaagtctcagtttggtgctaatacatctttaattaaaaaaaaaaaaaagtagagatgaggtctcactatattgcccactccagtctcgaacttctggcctcaaggagtcctgtctccccctcccaaagtactgggattataggcatgagcaaattcacttggcctcagtttgatcctaatatatctttaattcctctctacacttatctcccacttttaacagaaaagatcttgagttagaagctcttagcagagaactgagtctagagtgatttcattatatggttcatagtattgattttctatccatactggttttctattctgtactatactgagataaagtttttcatttaggtcaaaaataatttaaatattaagtaaatgttaatataagcagtgcacagaattggctctgtgctgtgcatgggctctgtgatctgggcaagttccctcacctctctgtgcctcagtttcctcacctgccaaatgggggcagtaatgatgccatgtgtgttgtaaagttactgggaggagtaaatgaactaaaacgtgtaaagcatctacaagcaggcccagcacacaggcagcaccaagtgaggatttgctagtggtgtttttatctgagatgccacctcctctaagaagccttcccttgatccttgctgactcgttgttattcctcatgccaggtccaaagtgtactgacaggtttcccctttgaccttcctatgactccccttagggcctaggctttgaccagccttatagcccaagggactatattgtactctcaagattggaggctgcctcctcaggggccaccctagccaggctcatcacacagctggctcagtgctctcccttggcaacaaccttaggataaaagacatttccagagaagttgtcacacagcatgcatggtttgagtgcttcacaagaaataatatcacaattccctctgagttggtaaggaaatgaaaaatgaatgaatgaatgaatgatccttcacaaaaccttcacaatgtcccagttgggtgaacagaataggaattatctccagacctcctgggttcaattttagtttcaccactcactagctgtgccctagggcaagttatttaatctctgtgtgtgcctccgtctttctcttgtaaaacagagataataacaggatctaccctagagagttattttaaggatgagatggattaatacatgtaaaatgcctagaactgtgcctggcacacagtatgtaaatatctgcaataataataactttctattttctagatgaagaaactaagactcagagaagacaaatgacatgcccaaagacacattgataagaacgcatctggtagtggtgttcgagtccagcgttgcagcagagagatgggtaactgtatggccgaacagctgtcttctcgtggaagaaggaggccaatgtccaggagtggcaggcatactggaacttggacttctgtaggccaacctgggttccacttggtagatgggggtcttgctgtgttgcccaggctggtctcaaactcctggcctgaagcagtcctcctcccttagcctccagagtagctgggactacaggtacacaccactgcaacccctcagtggttgttatttaactgaagggggttttagctttcatgtatcagctcactctggagccagacagcctggccttcatggcagctctgccccttactacctgtgtgacatcgggcaacgttactgagtgtcagatttcttatttgtaaaacagggataaaaatgacattgctgtgcaaattaaaagaaagaatccatgtgagatatttagcacactggcatacaatgagagcttaataaacattgttagttttgtaaactgagggaaaaaaatagccacaggcctgggaacataaatgcttggtaagcttctcagttccctggaagtctgacacgcaatgtgtatgtatgaacaaggcaggaggaagcatgacaccaagccttccttttaacaaacactgtttaaatcagaggtcggaagtcatggactggagattcattctctccccactcatttctgcccagagacacctggtgatctggcatacacagtgctatgaacctcagaattatttgctagcatttacaaattgtgagtactcccacatacaaactgtggtagatggaataatgcctccccacaaaaatgtccacagcctaatccctggaacctgggaatatgttactttacacagcaaaggaatgttgcagctgtgattggagattgagatagggagagtgtattagtctgttgtcatgcggctatgaagaaatacctgagactgggtaatttacaaagaaaagaggtttaattcacttacagctcagcacggctggttgggggggcgccctcaggaaatttacaatcatggtaggaggcacctcttcacagggtggcaggagagaaaataagagcagagcgaagggggaaccccttataaaactgtcagatctcatgagaactcactgtcatgagaacagcatgggggaaaccgcccccatgatccatcacctccacctggtcccccccttgttacaattcaaggggattgtaacaattcaaggtgagatctgggtggggacacagagccaaaccatatcagagagtcttcctgcagtgtccgggtgggtgcggcatgttcatagggtcttagaagagggaagcaagaggtgagaggacagaaatgccacattgctggctttgagggtggggccagaggagggacctgcaggcagagatagagctggaaatggaaaggaaaccttctcccttagagtctccagaagaagtgcagccctacagacctgtgttaggcttcagacctccagaattgtaaaataataaaattgcattattttaagccactcgaggcccatgtcctcaacaaagagaaagacggtggggtgctgtcagccagggtaggtacctgcttggtggtctgggtcctttcccactgtgtccattcagttacattacctgcccatctgctgaggcctcgagtttgggacctcaggtttatataattccttgcacaagcatgatcgattgattccggagagtagcagaacactgatatgcaggggaatctcctagttccaagtgtgagttgtagtctagacacttcctgttccctacagtcttttttttttttttttttttttttgagacaaagttttgctctgttgcccaggctggagtgcagtggtgtgatctcggctcactgcaacctctgcctcctgggttcaagcaattctgcctcagcctcccgaatagctgggatcacaggcacatgccaccatgcccagctaatttttgtatttttagtagagttagggtttcgccatgttggccagggtgatctcaaactcttgacctcacatgatccgcccgccacagcctcccaaagtgctgggattacaggcgcaaaccaccgcccccagccctcttccctactgccttgatgtgttcatctgggcaatgtgtgttgagggggcatagggaggggagctctaaggcaaatgtgctgggattctgcattcgtcatcctcaaaacaaaattggtccctaggtagttctgcctgtgatcctgcataatgtgcaaagccagtaagatgcctttgcctcatccccagggaacatgcctcccagccactttcatctcacctagtgcctacacagaaaggcaaccgcctccctgctgaagggaccccacgcctgtctcctgtttccacacaattaccccgggaaatgcctggcttcccatttccagttgcagccatcttgacagtttcagcctctccccacagcccacgtccctcacttgagcagcgagatgtgaagacagacagccgcttgagaactgcacagactgtccttaatctaagccatttaaaaggcatttgtgttccataaaacccgtttctgtaattctgtgcccctacttctttgaaagatgataaccctagggaggagattagccagggaggagaagttcagatgtgctaatattttaatcgctcattctttcatcacattagtcacattcattaagtatgattaatttcaggctttgttgaaaaccctatcagtttccctatcagccacacatccatctcttgccaagcaggctggtgcagtagcaccaaaagtcccccagtgttttttacacctggattgtattatgtgccccctgaaaatgtgtggaattaattgagctcatttgtttcaaatactttgcaagagcctgggctcttgagtcaggcggcctaagtgtgatcctaagtcctcccattgctggagtcacctgggcaagtgactgacgccctctgagccctggtgtcctcgtctgaggatggagataagaatacctaactcgaaagttggttgtgaagatgaaagaaggctttcaaattgctaagttagttggttatgattgtaattaagggcccttggagatggatcattcatccattcattcatccattcagaagatttgtgtacagtgactactgtatgcaaccctgtgtgtccactgctgatgagagagacagcagcaaacacagcagtcaaatgcgtgtggcccccaggaccttatattttagtggtggaagctagacaaccaccaaacatgtaatataccagatggtggtacgttctatggaggaaagaaaggacgaggggcagggagtcctgggctggtgggacagggtgctatggctcagagggaactcagagatcacctaattcaggccctgacctggagggctcatgctttgcacactgtgctaagaatttggactttctttctccaagaataaggacaatgagagccagcaagcagggaagtggagcaaggatggtgccgtccggctgctcagctgctggctggaactcccggaggactctgtgaggatgcaggtagaaggtgtgtaagcatgtgactgcatggaagccctcggcatgtgatccactccgtgttccaaattgccatcctttctgcgtgctgttagggacttcccccagctctccctgcagagtgaggagtactctgagacagacgggtctaggatgaactgtgttgatggagaaatgaacattttttggagggaaggaagatttcggggtgtggggcataagttgaaggagtatggctctgaaagtccttgggcagtttgtagaggacagagaaggtggtaatgtcagtttctgcccctctcccacctccacctctggccttctcagtggtcctatggctccctaccttcagtcatcttgttctcaagcctgaagtgctggatccactcagctgcaacccagctcaacacctctgtggaagctttgcccatcaatcaggagaagctgagatccagagactgatgcccacgttctgtctttgcagagggaagcccaccagagccctcttctctctggggaggagctggctccctgaatctccaagacaaacccagacagccctggggaccttgaatgtgagcaaggggagcagaaaggaggctccagcccacccagggcccctgcagggtctgcacacacaattacaggtcctcatttccctctcctaatgatgccccaaaacattaagggaagttaaatcaaaccaccaggtgtccagcatgaacagctgaaataataaattcacgaggtaagtaagacattttatttgtactatttcaaaattggtagatgcaggaaagcaaattgtgatgtgcttgggatttaatttgtatttcaaggtactaatgaaggtagcacccattttcccaaaggccttttcatccctgaatcttgagagcacttttctaagcatattgggaataaattaagttgcaaaacctccatgaaaaagattacggttaaaacataattttgaggaaccacttgagtttatccatttacctgcttttaagtacacacacctattttttttgcaattatttttcacaaaagaaggaactttgtgtgacgtatacaagcaggtaatggcaaacctccagcatctttaaaataaaactcaaattgggctgggcaggatattacatgcctgtaatcccagaactttgggaggccaaggctggtggatcacctgagggagctcgagactagcctgagcaacatggtgaaaccttgtctctactaaaaacaaaaaaaattagccagacatggtggcgggtgcctgtaatcccagctacttgggaggctgaggcaggagaatcacttgaacccaggaggtggaggtaacagtgagccaagatcatgccattgcacttcagcctgggcaacaagagccaaactctgtctcaaaaaaataaaataaaataaaaataaaactcaggctgaactaaaccagccttctgagtcaatgtgcagatattccataatgaagtatgctgattaataaattatttgattaccaggtaagtatacctgcaatcaatataactgccgaaaagctctgaattagaaatggtgcaataaaatttaactgaaaggtattaggaattggtagttttaattacagggaatgattaattgatcatttagacagtattgatctacaacttatttaattctttgcaatttaatttgtcagatttgaatccaaataactgatgatttgttccatgaatgccagagctggaagggatggggttggcagaagagacaagactggaccatggacctggtggttctgtgcagaggccaaagctactctccttcccacctggccctgtgctgggcctaacctggagccccctctatcctctgcctcattcttctccgggtcaaggtccagcatgaactccatgtcctccaggaagccctggtggacttgggcagacctggggacacgtccagcctcctggcaagatgggggtaacaggagtgtgtataaaggggaaggcaagaatgtgcccttggtggagcagtgaaaagaagccctcatgtgacaagtgttttgctcctaacccacctcctctggtgacatcttctgggttaactgctcttgctgatctctgcacataaaccaagctaactgtgagaggcctttcatttctagtttaaagcaaggagaccacagttccttctgaacactcacccccaaggagataaggagggcgtcccatgagcaacactgtgtgttaaagatgtacacgagcactgggacctgaccaaggacaaacacgtctccagccccctcagacccttgctgctgctcagatgtccgctgtcatcggtcacatcctaacctcaaccccctctctcctcccacataaaaggaggctgaaattcatagtaacttcagatggttctttaggacactggcccaccaccttctcggttgctggctctccaaaacaaagccccctcccttgacccaattccttgtttcttgacgtactggctgttgtgcagtgcatggtaccggcttgaactcggttatgttggcatggcctctggcggtgctcagtttgtgtggatgagtattttacagctactgtcctatttccagtccccttcctctggacggctatgggatgtgctgtggatgccctctcttaggctggaataaaccaccctaccttctcctctgccttgtctccaccaaataaactccttaaggcagggatagagtcttgcactccacgaagaagtattgctgcatcctcagctgtgtaagagtgaccgggcttcttctattccacctgtaatggaactttaggcacgcagagagagatggcaaatttgtgctggctgaaggggtcagcaaatgcatataaggcttcttgtgctccagagagagaatggagtgcagtcagtgagaccctgaggggagaaggaaccaaaagcctgggcagaagggatcgtggaggtgcccagggtcaggagggatgggaagggtgaggaacacaagagatcacctggaggcattagaggagaaggcaggcactggggatggtgccgctgatccaggtggagcaacatcctaggacccgagtgctgggcaggtgcatccgtggagggaagcttctctcctctctcggctcctgctgagagaggcaatcattcccctggcttgccctgcaagagacaggagctctaggtagatctctgctatctagggaatagaatgtgaatatttgaaagttctagaggtcaagtcttaggttccctctcagctcagatcccaaatggtacactctaccctaacccccttttcttgtagctttgctacatggagaggaaaataccttgccagacaccaacagtcccttctcagcacttttgtgtgaagacaactcagaccctaagagaatggggtctaatttgcaggtgccactggaaggcagaggtcacgggagccctggacttcagacaaggtagagggatcctggagacagcacatctggccctggagccctgcccacccggggagtgagggcagctctcctgctctcctaggaggcctgcccgaggacccccatgtcctctatgtgtgggattctgcagtttgcactcacaacccagagccttttacccaactaccctgtttgtaggaatgtgtccaaaataagcatcagacaagtacatgaagatgaatgtgcaaagacgttcataacaggattgtttataatcatgaaaaatgatctgcagatttcctgtctgctgtgcaggatgagttagacggggatgcatccataaaatcactttgccctcatttaaaattatatcatagatctatgtttaatgacatagtaaacggtactcaatgcattaagtgaaaaaagcatatacatatcaggatgtatatgatcaagtttttgttaaatggatgcatgtatgcatgtcagtaactgtctgtgtttgcaaacaaaacgtctagcaagacgtgcatcaaatattaacaatcattatctttggattctggatttattgacttctatttttgactttgccctttgtttttctatgttatctgacacttttacactgagtttatattatttttacaattaaaatatcaatccatcaatctacctccatttgggaagtagtaaaaagtacactgagtttatattattatttttacaattaaaatatcaatccatcaatctacctccatttgggaggtccatttcaactacacaaggaagacaggatagggaggaatagcactaagtatgagtgcctgtgattcagagagggaagcgacttggaattctagcccagctcctccacctgccccctctctaactcttccactctcccatacttgctcccggtgccccagcactcctgggtgcctcctgtcttcccagcacgcacaacccagctgagctttctattagtacccactttacccctgatcttcccgccctccacacctcttgtcactcccagtcactccactgatttttatttttttatttattgatgtcatcaccatctgaatcaacgatgtctgtttctttgcctgctcacttacagttggccttgtttactactgtgggaagctaatggtgtctactgtagccaaatcagcacatttatttatttatttatttatttatttatttatttatttggagaccaagtctcactctgtcgcccaggctggactgcagtgccgtgatcttggctctctgcaacctccgcctcccaggttcaagtgattctcatgcctcagactcctggtgggactgcaggtgtgagccaccacacccggctaatttttgtatttttagtaatgacgggctttcaccatgttggccaggctggtctcgaactcctgatctcaggtgatccacctgcctcggcctcccaaagtgttgggattacagacgtgagccactgagcccagcctatttattatttattttattttattttatttttttgagacggggtcttgctctgtctcccaggccagagtgcagtggtgcaatcatagctcactgcagccttgaactcctgggctcaagcactcctcctgtctctgcctcccaaatagctgggactacagatgtgtaccaccacacctggctgtaatcagcacctttaaagaacctaaagatggactcctgcccatcccaccccatgaaatctacatctgaatattagagaaactccaagggagttctcagttttcccatatcttctctgctcacacctgtgtccccacaacagcatacatcttgtccactgtatgtactcggtgaataagtaacaatcgaattgatagataagtggatgcatgtctcctgagccttggggaagaaaagagaagacagaagagggctacattagagaggaaagtttttaggccactgggcaggtacaaacaaggccaggcacggtggctcacacctgtaatcccagtactttggtaggctgaggtggacagatcacctgaggtcaggagtttaagaccagcctggccaacatggtgaaaccccatctctaccaaaaatacaaaaattagtcgggggtggtggcacgtgcctgtagtcccagctactcgggaggctgaggcaggagaatcacttgaacctgggaggcagaggttgcagagagcgaagatcgcaccactgaactccagcctgggcaacagagtgagactctgtttcaaaagaaagcaacaacaacaaaaaacaagagcaggtgagtatcaatgagaagaaacccctatccccagcagttggtgagttgagaatcatgccaaggaggacactcggaacagccaggtcagaaagcagcagcccctggtgatggcctggcccgcccagacagtgaatgccgttttctaaacctggtgagatgataaaattttaacctgctatgtaaagctatttttaaacatggaggggaaaaaaataacctttccctgggtaaaaccgtaacagtcacttagagcacaatggatctttattttttatgaccaagttataaattgttgaaaataagagtttcaaatggaaatgttgacataataatcttatctatagcagcatgaataaccaactataaccgttattattctgtgttctatgaacgttggcttttttgaaagttcaacttgctcaatatgtttgccttttaacatgagttaagaggtaatttgcatgaacacaaataaagaagtatcaattcagtggcattatgaattaattagctgcagcccaccatcatgaattgggaaatgcaaccgcactttccatctcttttatttatagcccactcttgctacgttacaccttttcagatattaagtactgaacatggttgcttcttaaaaaggttaattatccaagacaggtttatggtaccttatctaaaggccaatattctacttctttgggatcttggatttacataattacaatcagtggaaagtttatcagtcagatttcctttcccaccactcctcagcaggcacctttgtcctcttgagatctaccagtactgggggtctccaccagctggtctttgtttcttactccggcaaagcaacattgacagcttgcaacagccaactttccttgccttaaatgtgaggcacatggaatgaccacatgagcaaggcaggctgaatccagcccaaagcctgcagcacctggagcagagctcaccagtggaggctgtgcgcaaaatcaggcccagagccatggtttctttggcctgtaaagtgttaaaaaatgagattggtgggggaggagccaagatggacgaataggaacagctccggtctacagctcccagcgtgagcgacgcagaagacgggtgatttctgcatttccatctgaggtaccaggttcatctcactagggagtgccagacagtgggtgcaggttggtgggtgcacgcaccgtgcgcgagccgaagcagggcaaggcattgcctcactcgggaagcgcagggggtcagggagttccctttcctagtcaaagaaaggagtgacagacggcacctggaagatcgggtcactcccacccgaatactgcacttttccaacgggcttaaaaaacggcgcatcaggagattatatcccgcacctggctcagagggttctacacccacggagtctcgctgattgctagcacagcagtctgagatcaaactgcaaggtggcagcgaggctgggggaggggtgcccaccattgcccaggcttgcttaggtaaacaaagcagccaggaagctccaactgggtggagcccaccacagctcaaggaggcctgcctgcctctgtaggctccacctctgggggcagggcacagacaaaaagacagcagtaacttctgcagatttaactgtccctgtatgacagctttgaagagagcagtggttctcccagcatgcagctggagatctgagaacgggcagactgcctcctcaagtgggtccctgacccctgacccccgagcagcctaactgggaggcaccccctagcaggggcagactgacacctcacacggccaggtaccccaacagacctgcagctgagggtcctgtctgttagaaggaaaactaacaaacagaaaggacatccacaccaaatacccatctgtacatcaccatcatcaaagaccaaaagtagataaaaccacaaaatggggaaaaaacagagcagaaaaactggaaactctaaaaagcagagcacctctcctcctccaaaggaacacagttcctcaccagaaacggaacaaagctgaacagagaatgactttgacgagctgagagaagaaggcttcagacgatcaaattactccgagctacaggaggacattcaaaccaaaggcaaagaagttgaaaactttgaaaaaaatttagaagaatgtacaactagaataaccaatacagagaagtgcttaaaggagctaatggagctgaaaaccaaggctcgagaactacgtgaagaatgaagaagcctcaggagccgatgcgatcaactggaagaaagggtatcagcgatggaagatgaaatgaatgaaatgaagcgagaagggaagttcagagaaaaaagaataaaaagaaacgagcaaagcctccaagaaatatgggactatgtgtaaagaccaaatctacgtctgattggtgtacctgaaagtgatggggagaatggaaccaagttggaaaacactctgcaggatattatccaggagaacttccccaatctagcaaggcaggccaacattcagattcaggaaatacagagaacgccacaaagatactcctagagaagagcaactccaagacacataattgtcagattcaccaagttgaaatgaaggaaaaaatgttaagggcagccagagagaaaggtcgggttaccctcaaagggaagcccatcagactaacagcagctctctcggcagaaactctacaagccagaagagagtgggggccaatattcaacattcttgaagaaaagaattttcaacccagaatttcatatccagccaaactaagcttcataagtgaaggagaaataaaatactttacagacaagcaaatgcggagagattttgtcaccaccaggcctgccctaaaagagctcctgaaggaagcgctaaacatggaaaggaacaaccggtaccagccactgcaaaatcatgccaaaatgtaaagaccatcgagactaggaagaaactgtatcaactaacgagcaaaataaccagctaacatcataatgacaggatcaaattcacacataaccatattaactttaaatgtaaatggactaaatgctccaattaaaagacaccaactggcaaattggataaagagtcaagacccatcagtgtgctgtattcaggaaacccatctcacgtgcagagacacacataggctcaaaataaagggatggaggaagatctaccaagcaaatggaaaacaaaaaaaggcaggggttgcaatcctagtctctgataaaatagactttaaaccaacaaagatcaaaagagacaaagaaggccattacataatggtaaagggatcaattcaacaagaagaactaactatcctaaatatatatgcacccaatacaggagcactgagattcataaaacaagtcctgagtgacctacaaagagactcagactcctacacaataataatgggagactttaacaccccactgtcaacattagacagatcaacgagacagaaagtcaacaaggatacccaggaattgaactcagctctgcaccaagcagacctaatagacatctacagaactctccaccccaaatcaacagaatatacatttttttcagcaccacaacacacctattccaaaattgaccacatacttggaagtaaagctctcctcagcaaatgtaaaagaacagaaattataacaaactatctctcagaccacagtgcaataaaattagaactcaggattaagaatctcactcaaaaccgctcaactacatggaaactgaacaacttgctcctgaatgactactgggtacataacgaaatgaaggcagaaataaagatgttctttgaaaccaatgagaacaaagacacaacataccagaatctctgggacacattcaaagcagtgtgcagagggaaatttatagcactaaatgcccacaagagaaagcaggaaagatctaaaattgacaccctaacatcacaattaaaagaactagaaaagcaagagcaaacacattcaaaagctagcagaaggcaagaaataactaaaatcagagcagaactgaaggaaatagagacacaaaaaacccttcaaaaaattaatgaatccaggagctggttctttgaaaggatcaacaaaattgatagaccactagcaagactaatgaagaaaaaaagagagaagaatcaaatagatgcaataaaaaatgataaaggggatatcaccaccaatcccacagaaatacaaactaccatcagagaatactataaacacctctacgcaaataaactagaacatctagaagaaatggataaattcctcaacacatacactctcccaagacaaaaccaggaagaagttgaatctctgaatagaccaataacaggatctgaaattgtggcaataatcaatagcttactgaccaaaaagagtccaggaccagatggattcacagccgaattctaccagaggtacaaggaggaactggtaccattccttctgaaactattccaatcaatagaaaaagagggaatcctccctaactcattttatgaggccagcatcatcctgataccaaagccaggcacagacacaaccaaaaaagagaattttagacaaatatccttgatgaacattgatgtaaaaatcctcaataaaatactggcaaacagaatccagcagcacatcaaaaagcttatccaccatgatcaagtgggcttcatccctgggatgcaaggctggttcaatatacgcaaatcaataaatgtaatccagcatataaacagagccaaagacaaaaaccacatgattatctcaatagatgcagaaaaagcctttgacaaaattcaacaacccttcatgctaaaaactctcaataaattaggtattgatggtacgtatttcaaaataataagagctatctatgacaaacccacagccaatatcatactgaatgggcaaaaactggaagcattccctttgaaaactggcacaagacagggatgccctctctcaccgctcctattcaacatagtgttggaagttctggccagggcaatcaggcaggagaaggaaataaagggtattcaattaggaaaagaggaagtcaaattgtccctgtttgcagacgacatgattgtttatctagaaaaccccattgtctcagcccaaaatctccttaagctgataagcaacttcagcaaagtctcaggatacaaaatcaatgtacaaaaatcacaagcattcttatacaccaacaacagacaaacagagagccaaatcatgggtgaactcccattcacaattgcttcaaagagaataaaatacctaggaatccaacttacaagggatgtgaaggacctcttcaaggagaactacaaaccactgctcaaggaaataaaagaggacacaaacaaatggaagaacattccatgctcatgggtaggaagaatcaatatcgtgaaaatggccatactgcccaaggtaatttacagattcaatgccatccccatcaagctaccaatgactttcttcacagaattggaaaaaactactttaaagttcatatggaaccaaaaaagagcccgcatcaccaagtcaatcctaagccaaaagaacaaagctggaggcatcacactacctgacttcaaactatactacaaggctacagtaaccaaaacagcatggtactggtaccaaaacagagatatagatcaatggaacagaacagagccctcagaaataatgccgcatatctacaactatctgatctttgacaaacctgagaaaaacaagcaatggggaaaggattccctatttaataaatggtgctgggaaaactggctagccatatgtagaaagctgaaactggatcccttccttacaccttatacaaaaatcaattcaagatggattaaagatttaaacgttagacctaaaaccataaaaaccctagaagaaaacctaggcattaccattcaggacataggcgtgggcaaggacttcatgtccaaaacaccaaaagcaatggcaacaaaagacaaaattgacaaatgggatctaattaagctaaagagcttctgcacagcaaaagaaactaccatcagagtgaacaggcaacctacaacatgggagaaaattttcgcaacctactcatctgacaaagggctaatatccagaatctacaatgaactcaaacaaatttacaagaaaaaaacaaacaaccccatcagaaagtgggcgaaggacatgaacagacacttctcaaaagaagacatttatgcagccaaaaaacacatgaagaaatgctcatcatcactggccatcagagaaatgcaaatcaaaaccactatgagatatcatctcacaccagttagaatggcaatcattaaaaagtcaggaaacaacaggtgctggagaggatgcggagaaataggaacacttttacactgttggtgggactgtaaactggttcatccattgtggaagtcagtgtggcgattcctcagggatctagaactagaaataccatttgatccagccatcccattactgggtatatacccaaatgagtataaatcatgctgctataaagacacatgcacacgtatgtttattgcggcactattcacaatagcaaagacttggaaccaacccaaatgtccaacaatgatagactggattaagaaaatgtggcacatatacaccatggaatactatgcagccataaaaaatgatgagttcatgtcctttgtagggacatggatgaaattggaaatcatcattctcagtaaactatcgcaaagacaagaaaccaaacaccgcatattctcactcataggtgggaattgaacaatgagaacacatggacacaggaaggggaacatcacactctggggactgctgtcgcttgaggggatgggggagggatagcattgggagttatacctaatgctagatgacgagttagtgggtgcagcacaccagtatggcacatgtatacatatgtaactaacctgcacattgtgcacatgtaccctaaaacttaaagtataaaaataaataaataaataaataaaatgggattgtatgcctataatcctagctattcaggatgttgaggcaggaggatctcttgaggtcaggagtctggctatgttgcccaggctggtctacatagccagactccatctctacaaaaaaatttttttaaaaaattagctgggtgtggtggcatggatctgtaatcccagctacttgggaggctgaggcaggggaatcgattgagcctgggagatcaaggctgcagtgagctataattgcaccactgcactccagcctgggtgacagagcaagactctgtctcaaaaaaaaaaaaaaacacaaacaaaaacggaattgtcaaccagtatttgaaaatttggaggttacacacacacacatgcacacaccacacagacaatcagattgtcagaccataacagctgcactcctaggcagcaaccatgaggagtgatgtggagaccccggtttagacagggcctgagttctgcagcttctccgtggttgctcccagctcccattgtcttctagaacacgaagctgaggactggttgtgatttatccctcaatattgggtgcattgaaaactgtatggtacctgcctggcccttgtaactggaggagacatttacacaagggcagggctgcacctggggtagggagggacagggagggagaggagtacaagacaccacatgggggcatggaagaaggcaggctccggggttggtgcccccaatccaggtagagtgagtacgcctggcacctaagtgctaggcagatgcatctgtggagggagactttgctcccctcttggctactgcagggagagaggtaggaggagacctccctggaaggtgctccaggggaccagtttgcaaatccaagccctgcaaagccaagaaggcaggcctccagcactctattcaaccacctgcagacagtgtgcaaggtgagcaagacagaaggcaggactgcaggaagtaagcaaggaggtgacacagacagtgcctggagctgagagtgagagctgctcatgtgcatgatcagtgagggcctctctgtgatgacagcaggggagcagagaccagaacaagatggcccaggaagagctggggtagatgttcaaaggccctcatatgggcttaaaggcggtaccacctaggctctgcggagacgctggggtgatgggtatgagtgagctagcctaaggtgagaggggaaagcctgcaagagcttgatcagctagtgtttttctctttctctttttcttttcttttcttttttttttagagacaggttctcgctgtattgtccaggctggagtgcagtggctgttcccaggaaccatcccactgctgatcagcatgggaattttgaacttctctgtttccaacctgggcagtttcatccctccttaggcaacctgagggttctgcactcctgagaggtcattatttgggggctaaacttagtgcagacacccgactggcacagcgcattatagccccaaacttctgggctcaagccatcctcccaccttgcctcccgagtagctggactacagtgtgcaccactgcacccagcaagggcaatgttttttgcactgtgaagacccattattagatcgtaagatccattcattggatcttaaccagtatttaaaaaataaaaataaaaataatacatcataaaacagcatagaatagtggagaaaatacaaatgcattgcccgtaggaagggtgagcttgctttgtgagcctttatttcagttttacgtatgcacatgcacacacactgggtctggacttcgagtgccaggctgcagatgcctttaccttgctgaggccccccagctgcccacctgaaggaaatcagataagtgaagctgatgcgatgtgatcccttaaaagtcaggtggaacattcaggaggccctgagctaaacattgccagcagcaaggtcacaactgccagaacagccaaggccactcctgctcagcacagagaaggcagccaagcagatttcttggagcagctgccaagagagtctgcccagtgtgatggagaaagagccccacgtgtggagcacctgccaggtgccaggcactgcgcatcccgatctctgggtgagctgtgctccaagggccaagtccatgtcagtgttgccataagagatgccccaggcccagcaggcagtgcatgctccccacccccaccatgagctgagtgtttctggtcctcacatcagccctgcaaggtagatcttatgatctttgtgtcaggggtgaaaaactcaggcacagtgttcagtgactagctgaaggggcagagccagaattcgaacccaagtgagcctgacaccagggcctaggttttctcttccatgacacagttctcaccacactgagagtcagaggaggcacaggtcctctcctggggcttccagaagaatactgcttacaagaaaaaacaattataggaaaaataaggtgtgagggatactacggacacagctctgcattggctgggagagggacagatcaaaagccttctagcaaatatcaactccatgaggacaggcactgtgtctgccctgccttccaccaatccccagctttcaatacagcacctagaacatggtagctcagtaagtatctggtggatgggtagatggatagatggatggataaatggatagatgaatggatggatgaatgaatagatggataggtgagtggatacatggacggatggatgaatgatcactgtatggataggtgaatggatacatggatggatgaattgatggatgcatgggtgtatggtggacggatggataacagcggactggatagatggatgaattgatgaatacatacatggatggatggatggatgcatggaaagagatctgtgttgttggtctataccttccaatggctcatttgttagcaggccacattctctttattggcctcaattctgcacctgtagcctgagggcctgagttcagactgtattcagggagctttcatgggtgccatcagaggtctcccggacaatcctgctagactggctcctccctccattcccacccctatccctagaaaagcacagaatgccaaggctgcccagttgtgcacctgaggcagcccagttgggcatctctaagaatgtatgtagattatgaatgtgactgaccccatcctgggtgctgcagctttgaactaacacttaaaaaacaaaaaaaagaacacacacacacaaacacacaaacacacacattctggagtgagcttggcaaactgcttctgagcccttcctgtgtgggtagagagcacagtaattaaatggactggttctggagccagacttcctgggctcatctccttcgtggcagtgagaccaggcactggattctctgaggtttcacttatcctctgttaaatgggatagcacctgcctctccaggtcactgtgagggtcagacgctccccttagcggggactttccatatcactggggtttaccaacaggtcggtaaactctgtcacagtggcagggcttctcaagtccaagttcagcactaccccccagaaacaggtgagatatccttttcctgggtttacagtgtcctggagctttgtgaaggggctggtgtatcacatgaggtaatgatctgggactggatggactcccaggacaggtgtgagtgtcacctctgctgggtggccaaggggcacagtgctggacactgacaacatgaagtactcacctctatgcaatgctgactctcaaacccaagcaaatagagtctgcaggtgtgagtggggcatagagctgggtggcctgctgaagaattcactgccttgccatccctgaacacacacacatgtggtttctcccagaccttcgacaggctatagcccctggctttccccagtacgtttcctccttacatagttttcccaggagcctgacacctcactcccacctaactcttcttcctccctgctttcctgagagatattttagccatttctactaccaccattgcctcaaaccctgttctcttcctttcacagggaaccttgccttcttatcctaggagcctaaattattatcaatggaaaaaaatgcttgctagaaggcaaggctggcttacttattacactctactgaaaaatgggagaacaatcacccagtccgacaaaggaagggggacaatgacacttgtatggcactcactagataggctccatagcatattttctttttacttttttgagacaaggtctcactctgttgcccaggctggagtgcagtggtgcaacctgggctcactgcaacctccatctcaagactcaagtgatcctcccatctcagcctcctgagaagctgggaccacaggcatgtgccaccatgcctggctaatttcttgcattttttgtagagatggggtgttgccatttttcccaagctggccttgaactccttggctcaagcaatccatcctctttggcctcctaaagtgctgagattacaggcatgagccactgtgctcagcctagcatattttaagtgaaagaaaatagtagtaaacttgaagacagatcaatagaaattaattcagtcttaggtacatacacaaaaaaggttttaaaaataaaaatactttcagagatgtgtgagactatagtgtgtggtctgaaatgcaggtcattagaatcccagaatgagaggagcaacagaaaaggaaagaaaaaaatatttagagaaagaatagcctcaaaagctccaatttctgttgaaaaaattaacttacagatgcaagaactcgataaaccccaagtataataaaactaaagaaaattctactggatatataatactcaacattcagaaagccaaagaaagataaaattttgaaaacattcagccaaagtgactccagaagaaaaccagtaagaataatcactgatttcttatcatgagctatggatgccaaaagaaatagaaacaatataattcaagtactgtagggtggaaaagaacagtcaaccaagaatactatattcagataaaatatgcctcaaaaatgaaggttaaatagagacacttttagaaaacaaatactgtgataatttgttaccaccaacagacctgcactacaaaaaaagtaaaggaggtcctttaagctgaagaaataaagagctctgaaaatagtggatatgttcataaatacaaaggaccatttgtttaattttcttcttttaaaaatatgattgtttaaagcaaaaattgtaatactgcacaaatgggtttataatgtgtgtgtgtgtatatatatatataaaaataacactaaaaatagggtggcaaatggaaacatactatttcaagtttcctatattttgtgtaaagtaagttgatattaaccataagtagaatgggttaagttaaaggtagctatagtaatcctattaggaaccactaaaaacataaggcaaatatgtatattttggagacagggtctcactctgttgcccaggctacagatgtgtgccaccatgcctggaggttttttttttttttttttgtagagatgaggccttgctgtgttgctaggctggtctaaagcagtccttctgcttccacctcccaaaatactgggcttacaggtatgaatgcctctcctgcaaaatatatagatagaaagccaataaggaatttagatgaaatactaaaatattttaacaaaaaagaagaccagaaagtaagaacaaggggagaacaacaccaaatagattaggcaaatagaaaataaatagaaaaatggcaaactttgatacaccatgtcaataattacattaaatgtataaagaatattcacttcaatcaaaaggcagagatttttaagggttggataaaaagcaagaattggccagacacagtggcttatgtctgtaattccagcattttggaggttgaggcaggaggactgcttaagccccaaaatgtcagaccagcctggggaacatggtgataccgcaactataccaaaaaaaaaaaaaaaaaaaaaaaaggtggaggtatcgcttgagcctggaagtttgaggctacagtgagccatgttcacgtcattgcactccagactgggtgacagagaaagaatcctgtctcaaaaagaaaaaaaagaaaaagaaaaagcaagaatcaagtatatgctctttacaatagacacaatttaaattcaaatacaagaaaaatatattgaaagaaaaatatgcaaaaaaaatgcaaaatgtaaacatacaaaagctgaagtggtcataataatattagtcaaaatagatttcaaaacaagtgctattattactagaggggaagaagaactttgcattactacaaaagagtcaggccaggcgtggtgactcttgcctgcaatcccagcactttgggaggctgaggtgggcagatcaccaggtcaggagatcgagaccatcctggctaacatggtgaaaccgcgtctctactaaaaatacaaaaaattagccgggcgtggtggcgggcgcctgtggtcccagctactcgggaggctgagacaggagaatggtgtgaacccaggggcagagctggccgtgagctgatgtcgtgccactgcactccagcctgggcgacagagtgagactctatctcaaaaataaaaataaattaaaaaatttaaaaaagagtcaatacaatcaggaagatatggcatttataaaggtgtaggtgcctaataacagatcttccaaatacatgcataaaaattgacaaaattaaaaagcaaaatagacaaagccacagtcatagtaagagacgttagtgcacctctctcagggggcaaagagaactactagacaagaaaccagtaaaagtatggaatgtctgaagaacattatcaaccaccttcacctacttgacattgatagaaccctacaccaaacaactgcagaacacattcatttcaagtgcaaatggatgtgcatctagtagatcatacactatgtcatcaaacaaattcaatagatttctaaagaatgaaatcttacaaagtatgtcctctgaccacaaagaaagtaaattataaatcctagcagaattcagtcagtagcagaaatctcaccccgtctagtatcctgagaaacttttgaggaaaatctcctctctgcagcttttcagtaagcactgaactggggaagttcaaaaataaatttttcttttaaaaataactatcctgtttccactctgataagcacatgagcaaccattcctcactttgagctgatggcagaaaatgcaactccagctggagttagcaaaaaataaatgcattagctcatgtgaacagaaaaccccagcatgaggatatggtctcaccctcagcctcccctcagcctcccagctctactttattctgtgtggactccctcttgagcaatgtcttctatggcaggatggccacgttcatcttcatgtctggcagaaacagagctagtgttttccaagaggcacagcttttcgttatcactgtttctgattggctaagtctagatcacatgaccactcttgactctgaggttggcatcaatcattccactcactgcaagggttgatagtgagttggtggtttcccagagggacactgaggttgagaagagagaatgaactgagcaggcaatgacagcagatgtgcactccctgcacccactgggtttaaagatggtggagcaggaggtagggagaaatgtggagggatctgatgggcagatgaaatcccagcaggtcagaacttaccccagaacctagcttaacccccctgtctttccagacaatggtcacttccaggtggggggctgattagtgcatgtgtacacacacacacacacacacacacacaacacaaacactcattgttttcattttctttccattttttcacaatgaatacaacttatattatttctgtattgtgttttgaaaacacaaatatttaaggcaaaaacatcctttgggggttggaatcttttttctttttgaggggacatagagtagaattatgaaaagatgcttatcttcaaggtcaaaactgtacactccacaggtgctattacaaacatttagcgagtttctacttttaccctcaaaataggaataacctctcatttaattacctcataagttgtggggaaagccctcaccaaaacgtggagcatttgagatagtgcatgtaaaccagctttctataccgaaggtgttttacagaggagagaaaaggttatctgtatttcaattctggaagccacaggaaagtaacttgtgttactttcagaaacacaagtttctgaagctcctattcagaaaggatctttttccacccttcagagtcacagccttctttcccccaaagggagaagcctttacctgttgtatctctaggctttaaccaccacacaaatagaaataacaattgtagcgtggaacaaacccaagggacagaggcaattaaaaataaatcagacatcttggaaaaagtcatttgcagaaacagttgtgtccacagcatgaaatatggaggaaatacattaaagcaaaaattaatttaataaacactcaccctcattctttttaaaggatcgaatagtataaaatacttcattaggcaaagtctcagcaggggaacatggacttttttaaaaaatgactttgtaagttagagatggaagataaaaaagaagagagagatggggagaacatggcttttgtctgagtgtgcaactttagaatagggcagggaagttcaactatggggagaagatggtcagggtgcttaggaccccctcatatcccaggggtcccatcatgctagaaacacacaaagccagtgagacaatggcagcctccacccagataatccacacacacagaaacacatctgatttaagacccagaaatggcttcaacagtgccatctcctgccctaagctgctctgcacttgctctgggaggtgagtagaaatgctactgaggaaggtaaatcatctgatctcccccaagttgatcccaaggccttgcgcggtgctgggggatcagctgatgcccccaaatgcgtgccgattgatgtaatgagcatttgggggtgccaacccagggtcctttttctgttcacttcctactgatacccagctttttcttcaggaatccacctcagctcatggcccgacccagaattccagattggggcttttagtggctgaaataaattcaggtattccatttcccagacctggtcattagtttagaggtgacccttctgcaatgttgagacaggaacactcaccaactggattctgtgatgtgcaggcaggaaacctaaaattgtgggaacaactatggctgcaaaaagggaagtcagcccagggccaaagccagcacacacagaaggacccagagggagatcaagcaaaatagggcaccctgatcatgccattcctgaagctgtgctttccttgatttccaacagtttattccagtaggaataaatcttgcttgttttataggctggttggaatttggcagcagtttgatgtttgcatgttaagagttctgacactgagcaggttggagaatgagaaagagcaagacaagagaaaggaagggagagggaaattaagaaagggaagcaaggagaaaagagagggaagaaaggaggaaagaaaggaaaagaaaggagaaaaggagagggaaattaagaaagagaataaatgagaagaggcaaatcataataataataatccagaagaataaaagatttttagggcagtatggggttgtgtagactgatatgtccagctctcatattatggatgagaaaatagaggtcccaagaagcaacgtgactctgccagggccacaccatcagtgtgacccagcatgaggacccaagcgtcccggcacccagcctccttctttcttcccccaagtcacaaatatagagaagcagtttttatagctaaagtagttcttgcttattacagagaatttgagatgtgcacagaagtagaaaaaagaaaaaagccataatgttaccatgcagatataaccattattaacatttaaccaattttcctgtcagtattcttctgtatttaaggatcatttttacagagttttaaaccctcagtttacataattgtattccctgcttttttctcttatgtcgtaagcattccccatgttactgcatattcttcaggaacaaaaatgtttgactctataatattcaatcaggcagatagaccctcatttatttaaccgttttcctaccagttttcctaccagtggatatatttttcaaattttcaacacttactttcaaaacgcttgaagatcctcacataaaacttttttgtatgtaagattatttacttataattgattcacagaagtgaaatcttagggttgaagggcaggaattagggttgccacatttagcagctaaaaatgtaggatttaaatttttcatttcaaattatttatctgcaattgaaatttaactgggagttctgtattttatctggcaaccttagcaggaatatttttaaaggtttccatacatatttccaatgccctcagattagaaaagagagagaatgagggaataacatctaacattctattttgtgccatgcactcatttaaatattttatggccatttaagtgcatttaagctttgtgttgacctctaagttaaggaattattgtgagccctactttgcagatgaaaaagcagaggtcgacgaggttaagtaaaatgttcaagactacacaactaggactccgggggaactagaattgaacccgggcagcctgactgctacagtgtccccagaaagccaaggaaagagtgaaacaggccgagagaggagattcaggctgtgactcttgagagaagcagacatccacggtccgtcttgcccgggtccccctcgaagtcaaaatcagccatgtgagcagtctttcccgactcagagaccccaaatcctcaccacacattagcaggatattgatcattcactgaacacattggggcaagacagggatccacgcataatggaaataatttcataaaatccattttaaaactggtcaatcccgtctcgagttcctctccagctgccaggctggtccttcccatctttcagcctccacacccatcactccactcagctaaaacaccccctctaccacctagacctgccctccctggaaaggagaggttatacttaatgaatctccctgtttttcaaaatatcagacagtaagggactttattccttccttcttccctgtctcccatacatttccttcctttcacttcctcccttccccatgtgacactcaccaagcaccaagaagatcttcctccacccagaggcaatgaagacatcccaggcaacagccctaggcagaccacagagggtagccaggctcgaaggcttcagacaaagagccgggagggcccagaggggacacagcgctcccacctgggtagcgtgtaagacttcatggcacaggtgccgctgagctgcgcactgaagggctgatagattttgtacaggtagagatggattggaattaggccaggggtgaaagggaagcagggggctgccccttcccagtgagaacattttgaggacgcagtctagggaaagagagagcagggcttgagcctgaagcagactgagttctccagaatccccacgcatacttatcagcaactcctcgtggctgatgccgaaagagtcctgggtgacgccagagctggcttctgggatcttgttgtggggagcatccccacgtggccaggacccccacccattgctgggacaatatacagttgatatgcatggcttcacccaggccatcttttaaatgactcacaaaatgcatctaggattttaaaactgctcataaaaatggatcaatcagcacaaggctgaaataactagttccttttgctaggaaaaagaaaatgtgcttcttaattattgtactgattgcgtgaaagtttttttttaaatgcaacaaagaggcctctgaaggccctgtccttctacctgcctatagggtaaagaatctaattaaaacaaagaaaatagatgaatatttaatgatatgattttcccccactactttttacttctcaacttaacccagtgacagctccaaaaattcctccaacaaagaacacgcaaaatcccacgagcgtgatctatcagagcagagtttgcataaacagctctgtgcttcagagctgacgccacaactcctccctcaagccagccatggctgctgcttccacagccctctgagggtgccctggcctcctgtcctaaacatcccgggccttcagagctgcctgcccctgaggtcggtcctgacactgcccctttgttatgaggaccttgggaaagtggcccaagcacagcggcactgcctacgggttgccagaaggatgccactggaccaggtaaggaagcacttagcggagtgcctgacacagagcagccactcagccaatgactggacggcatctgtgactgtaacacacttggagactaaggtccaggggtgagggagggtgatttttcagaagtcacagacagattggtggtagagccattgtgaattactcctccctgtattctgagttacctcccatgtgttggcctccagtgctggctgtattctctgccactagtagaatggtccttcttgcctggacttctgcgctggtcactttgggctacacaaatgcctgtagctctcctcgggacctaccttcatcctattctagaatgggtaggtatccttttatatctgctaaattacttttgattctaagagacagaaagtttaagcacactgacttaagcctaaaggggacttcatcactgaaataccctagggtagaacttcagtttcatagctggatccaggggctggactgatgtccccagagcttggcttctccctctggcttctctctcctgcagcctccattttcagataagctgtcctctaggggttgcaggatggttcttgaagctctcacctctcatctaagcaagtaagcaagccccacccccccgcataggactcccaaaaaaagtttcatcatagcttattgactcaggtaaagtgggcaacatgcccattcctgaaccaatctccatgtccagagacatgtgatggaagactggcagggctatttcctctgagttcctgtgagtatcattagtgcctctactcatgagtctcccaggaggaggaaagggtgggttgttcagtagttttcttagccagaacaaattttcactaataaatctgtacttctgcgctggagaacagtgaaatgtgagtgcaggcagtgatcacacaaggagactaacacatcaaattcagccctccgatggacggagagtaactgcactggatcttcgaatgtggattcattgtcagcatgaaatattggcagagttcccatagacattctggttcccagcttccttggtaaaattgggttgcggccagagaggcatgtccctagctttgccctgctagtctttacagcaggctacagaacctgccttcactgctctcagttactgcctgggtgctgtggccggctaagtttgcaacccctggtggaagtccactcagtgttcataagaattcccctcaatctagagcactgttcagagtgagtgcctccttgcagctgagccctcacaccaggaatgccacttctcccatctccaaagagtgtcacagcaggcctgggaggcagatgggctgtttgggggaaggaagctgaagactgatgaggtcgaaggataccgaggtagaaacaagtgttaacctgtgtagcccaggcagtgggaggtagaagaggagggctttcctcagaccctatccctgggcctaaaatggaagaaactcagatatagggccctatgaagtccaaacggggagcaattaaaaggtgcacggggccaggagcagtggctcacgcctgtaatcccaacactttgggaggctgaggtaggcagatcacttgaggtcaggagttcaagaccagcctggcgaacgtggtgaaaccccttctctacaaaaatacaaaaattagctgggtgtggtggtgggcgcctgtaattccagctacttgggagactgaggcagagaattgcttgaacctgggaggcggaggttgcagtgggctgagatcgtgccactgcattccagcctgggcaacagagcaagacagtctcaaaaaaaaaaaaaaaaaaagaccgtggtcagcatcttctgtctctccaccttccccatctccctgcctagcgggaggacaggagcagcaccaggatggcagacatgacacctaggctgctgggcagtttcaccttccctccatccacacctttccccacaaccctgggggtcccctgaaaatccgtttctcaggctgacagctgttctgtaggtgtgggatgggggctggtgttcaggtaagccaacccagatgacagcaagacagacaactttctcaaaagtaaaatacagccaggcgtgatggctcacacctgtaatcccagcacttcagtaggccaaggcaggaggattgcttgaggccaggagttctaagcctgggcaaatagcaagaccaccaaatttttaaaaaattagctggacatggtggcatgtgcctgttccagctatttgggaggctgagcaggaggatcacttgagtccaggagtgggttatggtcgcaccactgcactccagcccgggtaacaagggaagactgtctctaaattaaaaaaaaaaaaaaaagtaatcaatttccctcttgtggtggcatctcactcccacatacaccctaaatctgccccttcctctccacctgttttgccttcagcctagacctagccccatcattcttacctggacagctgctccttctttttaactattatggttatttttagagacagagtctcatgctgtcactcaggctggagcacagtggtgcaatcacggctcattgctagctcaatctcctgggctcaagcaatcctcccacctcggcctcccaagtaactgggaccacaggcacgaaccactgtgcctggccagctcctttctttctcctggactcccgccagccactcttgccctgccacacacccacaacctgcttaaaatctgcaaatggcttctgatttcacagggataaaatccttactatttgcagaggcctaagaggcctttagtgatgcatctcccttcatttttgccgctcctgccccatgtcagatgctgggggtgcctcaccccttccacctgtcctttgctgaggggcagtgccctgctccacgctccaccctgtggcctagaactgcacctgtcacagagtgggtgccaaatgaaggaataaatgcatgaatgcatgaatgaatgaacatggtttggaaacaatttgagcagtctgaacttctgtttatcagtaaagacaagtatttttgaatccctatagacctcatttaaaaatttagcttgggtacaaggatggtgcggagaaacgggaaagttggcattattttacagtttatttaattctctcctcctgctggcactaatttaattcatctccatagctaacggaaggacggaactgaaatattaacctcaaaggcggtgcggaagcagataatggggctgtgcctgcaagcacagagtagaaagataaaagagagggacggctgcttccaggggagaattatgcggggagagaagtatagaagccttttttctaatggttcatttcctttctctttagtccaaagtgataaaagcaaataaatttgtgtttagaatcacagacatagtacaggaccattataaaaagacatcttcccagtgaaactttgtcagaagttcttaatgtcaaaagcgtgcaaagtggattaaaatatcacaggcaagcagcagagattgtcaaaatgacagaagattattaaacctgtatatttatcccttcattttcatctccacatgagaccccagcgtggtgctgtttctgtgtgaagccctcggccacgtggccagctgaatgtgggcggggacccgcctgggcagagcccaagatgccgtcccagctccccggcctctggcttgaacagagtccaatctaagagtcagaatacacagagaaagtggcccttctgcctggctgacatttagctgtcattccttccctcctgagggaactcgtgggcagtgacagcagaaaacactgcagggagaaggagcgggagtgcagggccagctgtgagattggcatggggtgactccttctgtctgcagggtccctggggaaagaagagcaggtgggcgcctcgaggctcctttctctctgggtgagttctagcagctaccaccgatggggagtatcctctgtgcctggctgtgtacctgggctttggacgcattctctcatttatcctcatcacagcccctgaggagggggctgttgtcctccccatttgacagatgagaaaaccatggattagaggccaagaacttggccagggtctgcagctgacacctgatggcgctaggttacagcccagctctgcccgattccaaaacaaagcaatccctccgtggtgccccctctaaggcagctccaggggtaaaaagcatgtagtcactgtggacgcatagatagggatacagaaagctcttcaggacagcatgtccagggcacaggcagctgcagagcagtggctccaggctggaagagctcaatacgtctgcattggcttataacagctctggaaaggtgctcggtgggaacaggtgggccagcagttgggagctgggggatggaggcaggaagggaagcgagaccttcatttcactgttgaccctattgtgctgtttgaatttgtctttctgtgtgcatggatttgaaaacacatatggtaaaacaacatgaaaagtagcttggctagatggaaaaagaagcctgggagttcgcctcctcacctgacctctccctattgcacacacaccttgcttccatctgccaggctggggttgcccaggcccctgcctcatttctgagccaggatctcctcagggctctttccctcttcactcgactgcctgctctcctctccctttcagcacaagtcttgctcctcttcagcctcagctctatttctgcctcctccaggcagtctttcctgactacccaaagccctctgtcctctctcaagatggtgcccagcaaagaaaactttcctgtccatagcccagactcacagcctcactggtatggtttggatctgtgtccccatctaaatctgatgttcacttgtgatccccagagttggaggtggggcctggtgggaggtgattagatcatgagggtggtttctaatggattagcaccatccccctagtgctgctctcatgatagagttctcacgagatctggtcatttaaaagtgtagctcctttcccctctctctctccctcctgctctggccaggtaagacgtgcctgcttcccttttaccttcagctgtgcgccatgattgaaagcttcccaacgcctcccaagaagccgtcacacttcttatacagcctgtggaactctgagtcagttaaacatctcttctttattaattgcttgtctcagatgttttttcttcctgtttttctttattattattattattattatactttaagttctagggtacatgtgcacaacttgcagatttgatacataggtatacatgtgccatgttggtttgctgcacccatcaactcaccatttacattaggtatttctcctaatgctatccctcccgctctgcccaccccacgacaggccctggtatgtgatgttacccgccctgtgtccaagtgatctcattcttcaatttccacttgtgagtgagaacatgtggtgtttggttttctgtccttgtgatactttgctgagaatgatggtttccagcttcatccatgtccctgcaaaggacatgaattcatccttttttatggctgcatagtattcctggtgtatatgtgccacattttcttaatccagtccatcattgatggacatttgggttggttccaagtctttgctattgtgaatagtgctgcaataaacacatgtatgcacgtgtctttatagtagcatgatttataatcctttgggtacatacccagtaatgggattgctggatcaaatggtaattctagttctagatcctggaggaatcgccccactgtcttccacaatggttgaactaatttacactcccaccaacagtgtaaaagtgttcctatttcttcacatcctctccagcgtctgttgtttcctgactttttaatgattgtcattctaagtggcatgagatggtatctcattgtggttttgatttgcatttctctgatgtccagtgatgatgagcattttttcatgtgtctgttgggctgcatagatgtcttctttttagaagtgtctgttcatatcctttgcccactttttgatggggttgtttgttttttcttgtaaatttgtttgcattctttgtagattcttgatattagccctttgtcagatgggtagattacaaaaattttctcccattctgtaggtttcctgttcactctgatggtagtttcttttgccatgcagaagctctttagtctaattagatcccgtttgtcaattttggcttttgttgccattgcttttggtgttttagtcatgaagtccttgcccatgcctatgtcctgaatggtattgcctaggtcttcttctagggtttttatggttttaggtctaacatttaagtctttaatccatcttgaattaatttttgtataaggtgtaaggaagggatccagtttcagctttctacatatggctagccagttttcccagcaccatttattatatagggaatcttttccccatttcttgtttttgtcaggtttgccaaagatcagatggttgtagatgtgtggtattatttctgaggcctctgttctgttccattggtttatatctctgttttggtaccagtaccatgctgttttggttactgtagtatagtttgaagtcaggtagcgtgatgcctcaagctttgctcttttggcttaggattgtcttgacaatgcaggctcttttttggttccatatgaactttaaagtagttttttccaattctgtgaagaaagtcattggtagcttgatagtgatggcattgaatctataaactaccttcggcagtatggccattttcacaatattgattcttcctatccatgagcatggaatattcttccatttgtttgtgtcctcttttattttattgagcagtggtttgtagttctccttgaagaggtccttcacatcccttctaagttgtattcgtaggtattttattctctttgtagcaattgtgaatgggaattcactcatgatttggctctctattattggtgtataggaatgcttgtgatttttgcacattgattttgtatcctgagactttgctgaagttgcttatcagcttaaggagatttggggctgaggcaatgaggttttctaaatatacaatcatatcatctgcaaacggggacaatttgacttcctcatttcctaattgaataccctttatttctttctctcacctgattgccctggccagaacttccaacactatgttgaataggagtggtgagagggggcatccttatcttgtgccagttttcaaagggaaatgcttccaatttttgcccattcagtatgatactggccatgggattgtcataaatagctcttgttattttgagatatgttctatcaatacctagtttattgagagtttttagcatgaagcgctgttgaattttgtcaaaggacttttttgcatctattgagataatcatgtggtttttgtcattggttctgtttatgtgatggattacatttattgatttgtgtatgttgaaccagccttgcatcccagggatgaagccaacttgatcgtggtggataagctttttgatgtgctgctggattctgtttgccagtattttattgaggatttttgcattgatgtccatcagggatattggtctaaaattctctttttttgttgtgtctctgccaggctttggtatcaggatgatgttagcctcataaaatgagttagggaggattccctctttttctattgattggaatagtttcaggaggaatggtaccagctcctctttgtacctctggtagaatttggctgtgaatccatctggtcctggacttacttttgttgataagctattaattattgcctcaatttcagagcttgttattggtctattcagagattcaacttcttcctggttttgtcttgggagggtgtatgtgtccaggaatttatccatttcttctagatattctagtttatttgcttagaggtgtttatagtattctctgatggtagtttgcatttctgtggggtcggtggtgatatcccctttatcattttttattgtgtctatttgattcttccctcttttcttcttcattagtcttgctagcggcctatcaattttgttgatcttttcaaaaaaacagctcctggattcattgattttatgaagggtattttgtgtctctatctctttcagttctactctgatcttagttatttcttgctttctgctagcttttgaatttgtttgctcttgcttctctagttcttttaattgtgatgttagggggttgattttaggtctttcctgctttcttttgtgagcacttagtgctataaatttccctctacacactgctttaaatgtgtcccagagattctggtgcgttgtgtctttgttctcattggtttcaaagaacctctttatttctgccttcatttcgttatttacccagtagtcattcaggagcaagttgttcagtttccatgtagttgtgcaattttgaatgagtttcttaatcctgagttctaatttgattgcactgtggtctgagagacagtttgttgtgatttctgttcttttacatttgctgaggagtgctttacttccaattatgtggtcaattttagaataagtgcgatgtggtgctgagaagaatatatattctgttgatttgcagtggagagttctgtaggtgtttattaggtctgcttgttgcagagctgagttcaagtcctggatatctgtgttaaccttctgtctcattgatctgtctaatattgacagtgggatgttaaagtctcccattattattgtgtggcagtctaagtctcttgtaggtctataagtacttgttttatgaatccgggtgctcctgtattgggtgcatatatatttaggatagttagctcttcttgttgaatttgtaatggccttctttgtttcttttgatctttgttggtttaaagtctgttttatcggagactaggattgcaacccctgcttttttttgctttccatttgcttggtagatcttcctccattcctttattttaagcctatgtgagtctttgcatgtgagatgggtctcctgaatacagcacagtgaggggtcttgactctttatccaatttgccagtctgtgtcttttaactggggcatttagcccatttacatttaaggttaatattgttatgtgtgaatttgatcctgtcattgtgatgttcgctggttattttgctcattagttgatgtagtttcttcatagcatcaatggtctttacaatttggcatgtttttgcagtggctggtactggttgattctttccaggtttagtgcctccttcaggagctcttgtaaggcaggcctggtggtgacaaaatctctcagcatttgcttgtctgtataagattttatttctccttcacttatgaagcttagtttggctggatgtgaaattctgggttgaaaattctcttctttaagaatgttgaatattggtccccactctcttctggcttgtagggtttctgctgagagatcccctgttagtctgatgggcttccctttgtgggtaactcgacctttctctctagctgcccttaacaatttttccttcatttcagccttggtgtatctgacaattacgtgtcttgaggttactcttcttgaggagtatctttgtggtgttctctgtatttcctgaatttgaatgttggcttgccttgctaggttgaggaagttctcctggatagtatcctgaagagtgttttccagcttagttccattctccccatcactttcaggtacaccaatcaaacatagattcggtcttttcacataatcccatattttttggaggctttgtttgtttctttttactcttttttctctaaccttgtcttctcactttatttcattaatttgatcttcaatcactgataccctttcttccacttgatcgaattgggtattgaagcttgtgcatgtgtcatgaagttcttgtgccatggttttcagctccatcaggtcatttaagttcttctctacactgtttattctagttagccattcgtctaatcttttttcaaggtttttggcttccttgcaatgggtttgaacatcctcctttagcttggagaagtttgttattactgaccttctgaagcctacttttgtcaactcatcaaagtcattctccgtccagctttgttccattgctggtgaggagctgtgatcctttgcaggagaagaggtgctctgatttttagaattttcagcttttctgctctggtttctctccatctttgtgtttttatctacctttggtctttgatgttggtgacctacagatggggttttggtgtagatgaccttttgttgatgttgatgcttccttctaacagtcaagtttctcagctgcaggtctgttggagtttgctggaggtacactccagaccctgtttgcctgggtatctgtcggcccctactgggaggtgtctcccagttaggctacatgggggtcagggacccacttgaggaggcagtctgtctgttctcagaaatcaaatgctgtgctggaagaaccactactctcttcagagctgtcagacagggatgtttaagtctgcagaagttgtctgtcttcttttgttcagctatgcccttcccacagaggtagcatctagaggcagtaggccttgttgagctgcggtgggctcctcccagtttgagcttcccagccactttgtttacctactcaagtctcagcaatggcagatgcccctccccaaccaggctgccgccttgcagttcgatctcagactgccaggctagcagtgaggaaggctctatgggcgtgggacttcccgagataatctccttgtctgccggttgctaagaccttgggaaaagtgcagtatttgggcgggcgtgtcgtgtttttcaaggtagtctgtcacagcttcccttggctaggaaagggaaatccaccaaccccttgtgcttcctgggtgaggtgacaccccagcatgcttcagctcaccctccatgggctgcacccactgtccaaccagtcccaatgagaagaacaaggtacctcagttggaaatgcagaaatcacccatcttctgcatcgatcacactaggaactgcagaccggagctgttcctattcagccatcttggaacgcccctccccacccccaccctttttttttttttttttttttttgagatacattttcattctgttgcgcaggctggagtgcagtgacaagatctcggctcactgcaacctctgcctcccgggttcaaacgattcttctgcctcagcctccccagtagctgggattacaagtgcccatcaccatgcctggctaatttttttgtatttttagtggagattgggtttcaccatgttggccaggctggttttgaactcttgacctcaagtgattcacctgccttggccttccaaagtgctaggattataggcctgagccactgcgcccggcatcagatatttcttgatagcaatgcaagaacagactaatacactcaccatccttgggtcagctcataagggcaggccacgttctatccttccttcatcccctcctcagttaattgggaagttcagaagaaacatctgtgttaaggttaactgagcacctgctacccacagaactgaatacgctgagctcgctgtgaagctaagggctgggcctggggctgcgggctattcaggttaggcaaagggaggaggacgggaagggccattttgagggctggctctctgtttagcaagggtgacctaagtagagtcagcgcagggagatccaggtttgcaaggcatgaatcttatacaatctggggatccagtttaagaaaaagagtataatattataaatactaaattttgtatgaaaatgaatttctattatgagaacataaatcacaacaaatattagaggcttagacattcaggccccttttcagatttctttaggcaatttgccagaaatacttttgcagacacattttatgatagcgccctggccctcctccccacccaaagctctgctgaagtcccaagctgccagcagatgagagggtctgatgcttcattaacttcataatcaattcatctctttggagaagatccaccatgccaggctgccttcgtgaagaatgaaaatgacaaatcaacagaaaccagctgtgatccagtgaacccagctcctatgatcccacccagtgccctcctggccctgggaggggcagagcagctcacagcaagcctcagccttgaaaagcagggttagaatccttggcacccaggccagggcctggtgcataggagagactcagcaaaaggtatgtgaatgggtagatgatagagagtagctatagggagaaaccagctgccagggctttacaggagagggggctcagagcctgatggctctacgtgtgcatttaatcaaacatttaagaagaaataatgccaactgtacacctctatgctcactcttctagaaaacagaagagtagaaatggcactctgacccagcttcatgaaactagagtcagatatttggtatcacgtttttttttttttttttttttttttttgaaatggagtctcagtctgtcacccaggctggagtgcagtggcacgatctcggctcactgcaaacttcacctcccaggttctagcaattctcctgctgcagccttccgagtagctgggctcacaggtgtgcaccaccacgcccagctaatttttgtatttttagtagagacggggtttcaccatgttggccaggctggtctcaaactcctgacctcaagcgatctgcccacctctgcctcccaaagtgctgggattacaggtgtgagccaccatgcctgaccggtatcacatatttctgataccaaagccagacagagaaacttcagggaaagaccaatattactcattaaataactatatatgctagaatgtctgaaatgtgaaagtattcactgtctggagaatgtggagcaactggaaatctaagccacagctggtgggatgtaaaacagtgcaatcactttggaaaacagatggacagtttctttaaaaattaaacacacatgaaaaagacatacacgtttcatgtaaacccatgatttcactgttaaatatttatccaatagaaatgaaaacatagggccgggcgtggtgaaacctggccggcatggtgaaaccctgtctctactaaaaatacaaaaattagccgggcgtggtggcaggtgcctgtaatcccagctaatttggaagctgaggcaggagaatggcttgaacctgggaggtggaagttacagtgagccgagatcgtgctattgcactccagcctgggcaacagagtgagactccatcttaaaaaaaaaaaaaagaaatgaaaacatagatgttttcatacaaacacttgtgtgtgaatgttcctaacactttcatttctgcgaaacttgacactgaagtgagcatccatcagtgtgaacagatgaagaagctgtggcatggccatataatggagtgttatccagcaataaaaagtctcaaaataattgtgctcagtgaaaaaagccagacacaaggagtgcagactaattgatgccatttacatgaaattctggagcaggcacgctaatctgcagtgactccaagcatcccagtgtttgcttgaggccaagaatggagggtgagattgtctgcaaaaaaagagaattttgggggtgattaaaatatgctacatctcagttggggggaagtggtcacaggggagtgtttgttaaaacttaaaatgtacaataaagtttattttaaacttgaataaatataaatgaataaaaacacacagtttcaaactctactcctaaatattttgatttaatatttaatgtctgggtagataaagcctaggtattttttataatgctcccctggtgcttctggggtaagacccaggttggtgaaggaattggacataacttttgaaaaggtcaatggagtcaggtcacttctctgctcaaatcttcacaaacacatcccatttccatctttgcaggttcgtctcagaatactctgtgtctctctcactgtgactctgccacctggactctcacccattcctttattgtccccagtggttctgctggttcaggctgcacgttgccctttggcctgcgatgctcttccctgcacagggccgcatgatttctgacattcatggcaccttcctcagcaaggcctcccctgacctctccatctgtggtcaccctccatccccaggctctctcttcatttctttgtttcattttcttcacagtgcttattgctttgtaaaataatctagctgtttcattacttgtgattcaccctctccgtagtttataagctcaatgagagcaggagctttgtctgtcttgttctctgcagtatcttgtcccccaaatggtgcacagtaagtgcttaagaaaatccagctggataaataagctcacagagttgttgtgaggtagtgaaactgaaagattcaccattgaccactgaagaaaaattacagaaaaggttgaataaatcttagaacgtgactacaagcagtgaaggaaatgcagtgcttcattttcttctttcactttctgatattttcctaaatccttgcaaagagcaaaaattgtcatgaactcctatgagtacatctgtccagccaatcagccaccatccgcctctccagaaaccaccatacggattcacagggaggagtccctccaaggcagcccttttataccccatcctccctggacacagctaactggagaagcagcagacaccttgcccttcctgggcaaatcagatcctctgcaggtggctagctaaggtgggaagttagctggctcctcctagtggagggagaaggggctaagaaagtggaatgtcttgcaccagtgggaggggagcagggcaaatgcagaaagcagcaggctagaccacagggctctcctgttccaaggcctgcttagctcaaacacgtcctcaccttagaattccctctcctagaaaccatccattctgttttgttttgttttgttttgtttgttatcttttttgcttgggctcacttgagtgcttctattagttgatacaagaagaattgtaactaatcaaacctccattactgtaataataagaaaaatagtgctataagaattcaatttacatacaaacatttttaatatgagtacgtatttacaaccggaacataaagagaggtccccttgtagtttctattgtgccattcttgacttgcaggttctctctcccctagtccaggatgcccttggaaatgtctgatttccaaaccaaagccagggctgtgggaatgctgatggcgatgtgggtgactgggtcccaggttgtctcagccttgcgtgggagcagccgtccctgaagacaccagtgccccatgcctgctcagcactaatttgagctgtgacaccattttccaagctgtcaccacctccagcaacaacagaacctctctggggggagcagggagggttggtattcaatttccctcctctgcttctcaagagttgagttcccaagttcaaagacatctatcatggtgagtgatggattgtatttcagagcaggttggcagcaggagggaattggatttagaaacaaccatctggcttttgcaactgtgtgccctttggcctgctcagcgtcaagcctgctgtcacacaatctgagtagccctgggagcagacccgaccctcgtgtccagcccagacaggtctctgtgctggagaagtagacagcactcaggaagctagtgaggaccccatggggctgctcatggagggagttggggctgagcacagagatctttttgagagccaactatatgctgggcactggggagacagactgaagaagacaaaatgcctgcccaccagcaacactcattcattcattcattcaaaatcatttagtttttgtgtgtgtgtgtgcctactaggcccaggcattggcaagtttgcttcccactggacaatgggcagctctttgtctctgaaatcgcactgttggggctcagatgccaactccattgccttgtttgttgtgcaacacaggcaagtggtgctgattggcggttgaacatcagcaccttccctctctacagcactgtgtccccccctgctggttgggggtaataataacacccatctatctatggtctctgaaacagtgtcgacagggcacctgtgagtagtaaatgttcactaatattagctggtaatactttttaaatttgcttattagtttttgtttttgctgttaccacttttattgtgtccatgcattctttactcagacacaattctttgaccacctttttaactgacttatcaattggtgtgatatccttacaccatccattttagtagccacagcaatggcagattttaatgcaataactcacactaataaggggtgtccctcttcgcatgtaatctcccttgggtccccataagctggggctctgggtggttccagagtctcacaaatgcaacatctcaatgccatctgtgtggtcagcagcttgacactccggctgcattttccattctgtgagcagattgggaggcagccaaggtgagtatcagcttttaggatacctggggagagactgtgtctcctcactgcttagcaaagagtggaagaacaaccaatcagtaggcagtaggccatgacagcacttgcagctgacaagcagtgtcactctctgtcatgttttcaaaaactctttaggggtagcaagctctagaagacaccaggttatacacgtttagcagaggctgcatgcaggggcaaagaacttgcagtgtgtatgctttggcctttcattgagatgaatcctaaaagtagaaaaaacgccaggcatggtggctcatgcctgtaatcccagcactttggaggccgaggcaggcagataatctgatcacctgaggtccggagctcgagaccagcctgaccaacatggagaaagcccgtctctactaaaaatacaaaattagccaggcgtggtggcgcatacctataatcccagctacttgggagggtgaggcaggagaatcgcttgaacccgggaggcagaggttgcagtgagccgagatcatgccattgcacttcagcctgggcaacaagagtgaaactctgtctcaaaaaaaaaaaaaaaaaaaaaaaaagtagagaaaaataagaaaaagactgggtgcagtggctcacacctgtaatcctagcactttgggtggccgaggagggcagatcacctgagctcaacagttcgagaccagcctgaccaacatggtgaaatgctgtctctgctaaaaatataaaagttagctggccgttatggtgcatgcctgtagtctcagttactcgggaggctgaggcaggagaatcgcttgaacctgggaggtggaggttgaagtgagccgagattgtgccactgcactccagcctggacaacagagagagactctgtttcaaaacaacaagaagaagcaaaaacactttgggaggttatttatcctttaccctcaagggactctcatctgggtagtaaaagaataaaatcgtttgataaaacagtataaaaagatgtttaaaccctagtggtgtgtagttgtgtgtgtacattagtgtgtgtctaacagaggccaagaatgagacaccagccaatgacatcatccacactgaatacagaaatcaccacattagctaacatttatggagtgtttattgtgttccagacactgtactaagtacttctatgtgcattacctcatttaattatcacaacataataatgtatgtaaaacacttaatacctggtgctgagaaggtgctgaatatgaaactgtcaccattactattattaattattattgtttagattatcatccccagtttcccgatgaggaaattgaggctcagggatgcaaaatggccttcccttgttttttaattgcaaaacgatctcaaacttggtgtgtgtgaatgtgtgtacgtgcacaaatctaaggatagaaagaatggaaagtgacctttctcctgcacctttctagcactgagaatgtagtagccactgccattcattcactcactaagtcctatttcgttttcttagctgacagatcaggacacaggaggatggaatataactcaaataacttttccagagtcacggagtgagacaggcgtggagttaaattcttccaaggtgggtgagcatgaacccaaagttctcctccactcagacaattcatcctgtaagactcaagatgctcaactgcagagtggtcatgacatgactcctgcatgctcaaagccacaggagggccagaagaagctatgcatgtggacacctcagtgggaaatcctgtccactgcgtaagcacccaagaaacagttgggtctcctcttttagtgtgaaagtgcagcatctgttcacactgtggggtgagcagtccacagagcagagcccacggttctgcaatccggggctctgccccgtgcccctctctggacacactttggcaaggacatggttccagtccactgctctgtgcccagaggatatctcaagccccacaatcacccaggaaaatggctttagttccagaaccagagagaaaagggaggcttcctggggaaagacaaggacagctagaggttcatttctgcccttggttctcctttctgcacgtcatgtgtaatcctgtctctaaatacctccctggctcagctgggcattctcatgccaactgggatgaagagcagctggttcaggctgtgattggttcctgggacctcttcttcccctactgccaaggctgcagttgccaccaaatgatggtttcccctccccctgacactgcctggagcccagctgacttcacacttcactcctccctcctgctcaccagtgataagaatagcaaccacagcatcaccccaaacccctccagggtgaaggaaggggcagctgtcaccttaagtgtcaactccaggtccttgtgagctatagaatcaggtttgagaaacaccctttggttggggaagtaagcaccagacaccccctgctggctgaaagtggaattcaggttcgtggtcccgctgcagcctgggagagctccctaatcttcatggacatcattatccccattttccagatgaggaaacagacaaagaatttgcccaaggcaccactgctagtcaatgatgccctccaggctaatcccattccaaatctcctttttctttccgagggactgcctaaatatctagatgttccacacccaacctttcaactctcccttcctatgccttttgattcagtaaatgcaccgtttgtattcccttggaaattccactctggaaggagaatcttttgacagaggcgtgctgcatcctgagacgctgagccgatgcaatcactcattatctcattgatgcagggcagaaggtcccctcccttccagcaggccacagaggaattcctcggaggatgcagatgctgcatgtcttgacttccaagccagggaatttctgcctttgtgcctgcacctgtattaattaatcattcttctaacactggctgtgtctacatgcattattctaaaagacaattctattcttaaaaataagctaatttaagccagtgatctgctgctttttcttttttctttttttttttttttttgctaaattttggttttaaaataaaatcaatcttaagaatagagaattcaataaggcaaaattcttgaaagaagcttatcatttattcatttatgtagcatgtatgtgacaagaccaggctagcaatgtagggagtggatcaaatagaactgacagcaaaggcccccagtctaatatgcggaagaaagaaaagacaagctcactgcagaatgcagagaaacacatcacacaggcaaataaaatgttccttgttcccattttcaccccttaacagcaaaaaaaataaatatgcattcatcttacagggcataaaagagaggtctgttcaattgtcaaatctagagaaacttggtggtggaggcagaattcatgcctatgagtttaccatcaattgctgagattattagaacaacacggacatgcttgggagtggagaggggactgagattagcatcaccagggaagtgcaacggtgggtgggttccttcttgtaggggagtgagcaggtgttaattgccattgcttgtgcaatggcatggataaggttaggctagcatttggcatccactatctgtaaagaaagggttttttaatagtcctcacatgtctacagggtgtgacagatttaaattagataagagataaattgttttcagggacaaattaaacaaagcagttaatgatattacaaatcactctcagctgtcattgaagcagtcctctgatgttgtccatgaggcccagttctgtccatctgcaagctgctgtggggccctgagcacagaccttgcagctagaccatgtgggcctttcccaggctctgcgcttcccaggctgtgagcctgtgatcacctcacctcacatcccggaacctcagcgctgcatctgtgaaatggggctagctcccccatctcctcagattgaggtcaacaatgtgatgtcataaaaagtgttcgctaaacacggtcaccactatttaaaaaacaatcacgcaagcttggggtggatgtgatttgtctgtgcaaagggtcgacagtggtggcgtgcaatgatcgcctcacattaccgagtaaggtggctctgccaccatcattcttgttgacttctgggggagggatggagtcccaaagaaaagaaaagaaggtcccagggcctctgggaaagaccacattacatggtgtgggttgtgttcctgaatgtgtccatactggaatgtgggtctctggaggacggatgttcccagtttctctctgcaccactcccaccccactcctaacgcttctccttgactggaaggaaacatggcctcctctctcctcggggttcatctcctatgggggcttccttcctcctggagcctggagagagatgcggggggcaagggttgctcccacttttgagcaagtcctgaattttatctcccaccttggcctgcgtgcaaaggacagggtacctctcatcttagtgttctgcctcctggatgtgcgttggacattccaggctgtctctctgtccacattcatgtaaggccccaacacacagctgcttattctgcagggtgactcctgatcaaggccagactcagcaccactccagattgtgcactgtctggggcagggccctccgtgtcgcctttctgagcccctaacagatctcgttcaaagccggacccataatcaatgctcagagaaagtgttgaacagacacatgccccaaagagtctgagcttcttcacttaaagtttcctgggctctgcctccatcctcagaaatgacccatccatttcaaaaagaggctctccaatgtcaatactgcacctccccaggatccaaatccatttccctgctcctccagcacagcacaattaataaacgtcccactggcttgccattccaggttgggagctcacagcatcccttgaaaccatgctggcagagaatttgtcaccgtcaactcgctgctcctcccgtggtgccacaccccagatgacacagagcatggcctatgcctgtcagcagaccctccactgctgctgttgccagcccccaggtctcatcctccttccagggtcacctttggaaatgctgcccactgagtaagtgcccaagaaacaatcaggtctcctgttttagtgtgaaaatgcaggtctgttcacaccctggggtgagcagttcacaaagcagagcccatggttctgcaatccagggctggctgtgccctgcatccctctctgggttgtgaggttgtgtgggctgtggatccatatcacatgccaaatactcttcctggtgagagggatgcagagatcagcagacacacgccaagacaccaataaactggcagccacctacaatccagagcatgtcagctggtgacaagggctgagaagaacacccagagtggctgcgtggccagggcggcatcctgaagaggagattgccaagcagtgctggaattgtatgagtaagtcagccagggacagtctgaagagtgtgagccaagtaaagggaacagcacacgcaaaggccctgtggcaggaatgtggttggcttggtctggaggcagaggaagctgagtgacaagagtggagtgacaagggggaagagagaggcagaggctagaacaggtagggcctgtgagccatgggatgagcttctctaaaattcagccccctgaattttagattcagggggtccaaatgcaggtgcgttccatgggtgtattgcctgatgctgagatttgggcttctgttgaacccgtcacccaaatagggaacacagtacctgacaggtggtttttcaaccctgttccctccctccttccccactctagcagcccccagtgtctaatgttcttatctttatgtccatgagtacccagtgttagctcccacttacaagtgagaacatgtggtatttggttttctgctactgtgttaattcactttggagaatgacctccagctgcattcatgttgctacaaaggacatgatttcattattattattattattatttgagacagagtctcactctgtcgcccaggctggagtgcagtggtgcaatcttggctcactgcaagctctgcctcccaggttcaagccgttctcctgcctcagcctcccaagtagctgggactacaggtgcccgccaccacgcttggctaattttttatatttttagtagagacggggtttcactgtgttagccaggatggtctcgatctcctgacctcgtgatccacccccctcggactcccaaagtgctgggattacaggcatgagccaccgcgcctggccctcattattttttagagttgcatagtattacatggtgtagatgtaccatacttttcttagcccaccattggtgggcacctagattgattccgcgtctttgctattttgaaaagtgctgccatgaacgtacaggtacaggcgtctttttggtagaatgatttattttccttggggtacagacgcagcaattgtattgctgagtaggatggtagctcggtttttcattcttcgagaaatcttcaaactgctttccacaggggctgaactaatttacattctcaccaacagtgtataagcactccctttgttccacagcctcgctagcatctgtgatgttttgactttttaataatagccattctgatgggtgtgagatggtgtctcattgtggttttgatttgcatttctctgacgattcgtgctgatgagcattttttcctatgtttcttggccgcatgtatgtcttcttttgagaaatctctgttcatgtccttcgcccaccttttaatgggattatttctggtttttgttgttgttgatgtgtaagttcacagaaggagtttccatctgaggctgagagtgggcagcagaggggcgccgtctgatacagaatatccagaatgtctgcagttcccttggctacccacaccgcggggcttgagggacaggagccggcacaggagagcttggctgcagtgtggacagtggtgggaggctggtgggtgcagaaacggggaggtcattcaggaaacggtggcaggcgtcatgaagcaagtacggaggctaggcccgcgggggaggctatggggaaggagagactgtgggcagctccagggagggcggcccagaccccgagacagactgatgggacccgtggagagagagggcgagagagggatggaggggctgcgaggcgtccagcctgcataacaggtgaacaaatctgcctctctaaacacgagatctgcctgcagggaggcgacttccctggttcagtcccctctgatagagaccggagaaaaggccacctgggcaaagcttcccaggtggggcgagcagctgtgggaaacggtgcgcactggagcaccctggccagccagtttttctctgtgtttgcagaaaatagtcatttcctcctctttcttctttttattgccaggagagaagcatttccgcgaagccccagtgcacgtgatgggaacgtgctcccacttcctatgagttgctagaatgccgaacagtctttgtgaacgcaaatggatggccttgtcagcagcgagaatatgtgcagaatatacagtggcattagacagggaggtggccggcatccatggagcagatctgcatgggtacagcccgagggtccggaggcgggctggagacctactctgcctccgcccagcttcctcatgctcgagcctgctagggcaggactcagcccagagagcctgctggatttggggctctgtgtggaagggcgaggagacatcgcagtgccactctgacactgcatacattttcctaaagcacaggaaaggaaacagaaggctccagggagccccaggacttgacctctgggattgggccattctaagggcaggctcagcagtctctctgctctccaggaaaggcgttccctctacgggagacagctctgggcttgctttgagggctccagactggattcagcatacgcgggagctgggggagggcggcttgcaaggcggtgagctccccgccactggaagctggaagctacagggaagcttccgcggaggactggcgatggcttctttgctccaacagctgctccttgtgccaggctcaggctgagttacagctagaggtgcagtggctacaagagtttctgctcacggtcatggaagagaaagaaaatgaacaaggtaagtgccatgaaaaaaaaaaaaaagaggcatgggggagaggtgggggattttgcagcttggtccccagcagagaagagccatttgctgaaaaggagtagcactgggtgcatctggagcagcggcagcccacgcagagggaacagccactgccgaggcccagaaatggacattcgttgtgacattcgatgctgctgagatgacatctagcagttggtgccttcccctccaagtccagagaaggaggtgaggcctcaccgggggggcctatggcctggaaaaaacctgtgtaggtgtgatcttgttctggggtccactgggacgggggtgacaaccaggcggccaaagtggagcgtgggaaggggcgtgtcaaagctgagctctgtcctgcaggcctatgggccagcggctccctctgtcaggctggtgggagggggctccgtctgccatctccctcacccgcccccccttcccccccccccccgctgtggctgccagctctcacacccggcatacgctggattcttattttagctactgtgacaattctcaaaataggcaccaaagaggaaaaggtgagccttcccccacaggtgctggagggagggccactgtggggcacacaggcagcccctcccgacatggggtcttattgtgtttccctcacacttgcaacgggaacagagtttcaaggctgaaagtttaaaaactgcttcaggacttcacgaaaaccctgaatgaaagtgctttaaaaagtggcaaaaaaaagaaagaaaaagtaaaaacacccagaaagtgccaaagaaaaactgcaacaaagtagagaagttaaaaataccttaaagtaatggagaatgagagagtttaacattctcttaggaggaagatttaatccagcagctgacacaaagtgtttgcagtcgtggcccgggaatcacgggagttgaatcggagcccctgaagatcacgttcccaatgaacaagtgcaggaacagaggccacagcacatacccagggacatcagaacttctcacatacaggttgggtttgcgtgcatagaaattccttcctcttactaggtacaagcaaaccctcctgaaggaaccagagatcctagaatttctaggccatgtggacatcatcaggatcctcgttgctgtctcagttgtgcttacccttgggggactttcctactggctgagagagcagaaacaagacattaaaccaagctgggggtgtgccttccagctttgatgctgagccagaaagatgggggtggagacgccacttctgcagagcccagggatgccacttgaggatgctgtattcgtttttttattgctacatgacagattgccacaaatttagcattcaaaataatatgtttattaactcacattttccatggtccaggaatccaggccccaggttctgctcagggtctcacgagcctgaagttgaggggcccccgggcctgcattctcatctggaacttgaggtcctcttttaagttcattcagtttgttgtgagaattcagttccctgaggttgtagggctgaggcccctagttgtttttttttttgttttttttttttttttgctagttgcttgctgggcccatgctcagctcttaggaccaccctctgttccctgactcaggctcctgtcgttggtttacagtattgatgtctggcctcttccagcattgcaggaacatgcctcatgctttgaatctctctgaattccctgtctgtgacctctagacccagatttaaagggctcatgtgattaggtcaggcccactctgagaagctcccttttgttgactcaactgattagtgaccttaatcacatctgttagtcattcaacacagtgatcatgagaatgataccccaccaagttcacatattcacagttcctgccacgcttgaggggagggagtcacagaagctgtgcatacctggggcaggagtcttggggccaccctagaattctgccaccacaggcatccctgtgggaccaagccacagccatccagtggtgccctgacccctccatgtcccttggtgacctctcacccgctgtgctgtcactgacagaatcccagagacacggggctgtggaaacttcttctagtcatcttgtcagtgacaggaagggtgctttgccttgccctaagagtgatgcttaatgatctctcagttaactggcttttcctcaaggatctgaaagccaaagtcctccaaggttgatcactgagcccccacagcctattttatcatcaagaaggcataagtgtacaggttccaaagtcagacagctgagctgcctaccagctgtgcagctttgggcaagttgcctggcttctctgaggctcagttttctcattataaaatcgagacaagattggccctacttctagaatcattgtgaagattagagtctatttaaaacacttggcacagtgtgtggcacacacagtaagcagctggcacttgtgatatggtggcattatctctcatgcttctagagaggttggggtgaagatgtgtgcatgagtgtgcatatgtgcatgtggtcatgtaggtacatgtgctcgcatgagcatgtgtgaaagcatgtgcgaccatgcatgcatgtatcacgtgtgtgtgcattgtgcctgcataaatgtgtgaaagtttacatgtacatgtgtgagtgcaagcaggcggatgcacacaaggttcaaattcaggaggtgtgatgctagtcacagctcagttttcaagaaggtgcctggcatgggcaggaaggtacctggcattccactttctgcacctcagtttctccatttgcaaagcaaaagatggactagattttctctaagtactcatgcatctctaaggtggcaccatcctacatggaggccttccagaactttctttggctcttatttgatttgatcatttgtttttacatactttgtatatacatactgtatcagtcagaattttccagagaaacagaatcaaaaggatgtatagatagatagatagatagatagatagatagatagatagatatttagaaagctatttatcataaggtattggctcaagcaattatggaggctgagaagtacagacacaggagagctgatactacgaattccagtgcaagtctgtgcttgaaggcaggagaaaaccgatgtcccagcttgcagacagtcaggcaaagagaaagaattttcttactcagctttttgttctactcaggccttcaactgattggacaagctccacccacaccagagagggccacctgctttcttcagtccactgattcaaacgttaatgacatctagaaacacccttatggacacacccagaaataatgtttagccaagtatctgggcactccatggctcagtcaagttagcacataaaattagccatcacagttactttacgtacatttgcgtacaccaacgtacaacttttaaaggttaaaaatgtaggaaagatgcactcggtcacatttgtggaagctacgcttgacaagatagcaatgcttaatgtggaaggccaccatcacaccctttgtatcactctcccccaggccttttctccattctcctgaattgcacacttttcaagtcttctgatctgaaacatttctccccaattgaggcgatcggacgtgatctcagaccgtaatgtattgtagcttttaactgttgagccagactttctgactcagcacattttaatcaattttctttgctaagatcagggagatgtcatctataataatcccatctgacctcccaaagtcaggctgataaaaatattaatgtcagcttcttgcagcctggcagagagcaacacccagcttgacaagcaaacaaatggctcagagctgtctgcaggacaccgatgaacccgtattaatgaatagcttcatcagcaagcattgccctccaggcagagctgccacaggctggagactcataagaggctcagcagccttcctggcgaggtcttattgcccatcattggggccatggaacgtcaattagacatgtctgctaagatgattcaccctcctccataatgtgctccagttgggcagctgggatcacccaacatggctctttacttcttttattctccctgcctaggaaccctcccattgtcacctgtgtcaggtatttccagctgtgacatcagagacattaggccctctgagaacacttagcaatcctaaataggaataaaggattattcccaagggtcacaactttatgaaccttgacctgattcagcaaggagtatgtttatttgatcatcttgtttgttcatgcagtttctcaagaaacgattaccaggtagggtttgagtgactcacaatacaagcagttcagcatctccctaactcttgtccctctgtgaatatctatgcttcttgtctggacgctgcaggttctgagtttctcactcctgattttactggggccatggtagagcgaggcaaatgttaacgtgctcacatcacagatgcaatcacttgtccaggctgtgagtcggtgctggggcagctgcactgctggcctctggactctgactccagtgttcattgcattagccctctctcaagtccatctttctgtctctagtcttcagagcctgggacctttcattgtgaaagaggagaggacaagcttttcccatgcgggtgagcagcgaatccaagttgcctgtctccactcttcaaaggcaggaaattgtttcaccatgttccacaaaaggaatatggtctgcaaatggaagaatcatttgggaaagcagcttatgcaggagccccaggagggtggctgcagttgattcaatggtctcatgacggtgtgatgtgtgatgcagtagcctcctggcaaagaagtgcccccaagcagacccgctgtatccttggaccctgcagcagccaaactacaatacatagccacaggcattggctttgcccatccagtcccctctatacagcccattcatatgacctgagcactaaataaagacctcagaatggcagagatacagccagggagccgctgcttactaaattactaaaatgtaatgcctcactgggttggatgccggcattggcagggcttttgtttgttggtttgtctatttgtttagcaaaattagcaagcaaaattaaacccttgtcaccttcttcagccggaatgtgagctggaagaccattctccagagcagagccttcatttgcaggcttttctataactggggagcagtggagggacaggaggtggaagggcactgctgtaaccaccacagggcatcttactcagccccaggagtgaaagtggaaagaaaagcacaggcagagagacctgcacactttccctgctccctagaggaccctgccaatcccgggctgtctgggtactgcctcccaggagctctgtaggaaactggaaagggagtggttggaaacacagtctctgcagtcggagctggaacaagtcactgaatccctctgtgtctccacttccttgttttatctcaaggatgataatactagcatatatctcccagggtggttgtgaaggttcaataaggtgcatatgcaatatgcttagcaccaaaactggctcgtaattacatgcacaataaatgctagctttcattaatgctgtctgtcacgtgtgagataaagctactggtcccaggaggcctctactcctgctaggatgcagttcccttgggcaaatggtactcccagggctggtgcgcagcgcctctgagcagctgacagccaagattagatgagttaagactgtgtctcctacctccatttgcaaaatcctctataaaaaggtagagtaggtaaggtggaaggagagagtgagtcacccttcctggagcacaagccagcggcgccctgacccccacctgtgctgtgtcccatcaagctcccgtaagaggcctgtgtacatcctgctgtctttccccagcacagcctgctttgcacctcctccaagatcctgctatatggaggtgatttgggaggaagacaggaccatgggtttccctgacctgcctatttctttgtcctaaatagtgttaccgagccccaggtcttcaggcataaagggacctctcaggctgggacaacacagtgcatcttagagggagccaccatgaactctggaaccttggtgccacgtgacatccaaggacatttgtgtaactcagcagagtaaatgaggacaaggaggactaaattgctatctgagatcgcctttcccatcagcaagatggtggaactggggttctcagtgtccagtttaagttgatttaaagaaacttgagaattgtaatatgtattgcatgctgcaatcatgaactatcgctcatacctgctgcacatctagcccccctcccttcctccgctgccacttttggtccagcatgaaaagacctcctagctggtctccccacatcctcttgttctccttctgcctactctgcacatggcagccacaatgacatttgtaaaatggatatctggtcatgcttctcctttgctaagaccctaggaggaccaccactgctgctcagcaacccaccccccactggctctcagccacccactccaccccatcctctttggcgccaggctccagctgtctccatcattgccagctttcactgagctctcacagtaggcctgaagctcttccacttattgtatgacctcatttagtctcaactccttgggagatatcttcacagaggcacagtgaagttaaattatttggctaggattgccaagccagggccccaaacctagtcccagcccatctcttctatcttaataaatatcatcagctgcccagcatgtcatgccagatgcccaggagccaccttccatcctcttcctccatcaccccctatatttactgcagcagcaaggcctgtggattttcattcacctgcctcccgtgcacacatttgtcccttccactgccgtctcgctggtccagtcaccaccatccctcactggaacaactccagcagcctcctcgctggatggcctgctctaatcatgccctctgtttgtttctcttcctctctcctttcctccctcctttccttctttgctctcttcctctctccttccatcctttctcctttttctttccttttttttttttttttgacagagtctcacccaggctggagtgcagtggcatgatcttggctcactgcaacctctgcctcctggcctcaagcgattctcctgcctcagcctcctgagtagctgagattacaggcatgagtcaccatgcccggctaatttttgtatttttagtagagacggggtttcaccatgttggccacactggtctcaaattcctgacctcaaatgatccacccacctctctttccttttattttattttatattttattttgctttccttttattttgaaatgtaggttttctttctattgaggtatgatggattgagcagagcaggagacacttgctattaaagagagagcttgttacgcacagttcccaagaggaggagacaccatgccatgagggggccacagggggaagagggagggaggggaaagggtggacaagagcctttatgtgatttccatgggaagaaacagacgaggcaaacatgtaggcttaggatccactagtttgtccaatttcagcagccccagcatgcagaggctgtcactagttgtctgatacctggccccggggtgattagggcaaggcctggcgtgattggtggctaaaagtgaaagaacctacgagagcccaggaaaggaagtggtcggggtgtgggctctggattgattggtttgtcgaccaaaggggaactcgcaggggagttgcttattttctctaggaactgcctgtccctgggaggggcagtccctccagggtgaagtccccagcatctcaaaacatcagaaatacagaaaataaaaaggcatggttagtattctttccttccttctttccttccttccttcctttcttccttccttcggagaatctctaaaggaaatagcataccctaaatacagttgaaacccccttcccctacaaaaatcatacatatgattacatatgcataatctctaagttagatatgatatctatgcatttctataaattttctaaaggtattttgtctctttgccttatgtgcccccttcccctacagcacttctctcattctccatcaaatgcctgaatgtttctaaactttgcatgaattatatcttgagtatatgatgtgtgtgtgtttgtgcatgtgtatgaagagaaagtttccaagatacattcaagaagagtaacaaaaggcaaaaatagacagaattcgatgtgaaagtgcctcctaaagaaacaagcagcatgaacaagaataaacctatcccctacacctcacagtcaaccgcagggcgccacggacagggagaaacacaggaaaggccatcggaagggaaacgaccaaccaccaaggggtgcccattgactgggtggagaacagacttcccaaccataagcggcgcaataatatcttcagaggccaaaataaaatgaaaagccaacttggaactctatggccaattaagcttttcggacataaaaagtttactacccacatatccttgctctaaaaaaagaaaaatctgtgacaagaaacaactcaaaatacacacatacatgaaccaaagggaaggaggggaaaggaaagacaacaattgatagactatgttttatttatcatggacagtttcagaaaaaaatctattttccctaaattacggaggatggaactaaaacagagaaaaaaggaagggtgttccctgaagggttaaagcatattagggtcttaccttaagaccctaagaaaaggaaacaaacacacgaaatacctttaacaaatttatagaactgcatatattatacctaatttggagattatacatttataatcatatatacgattaaaaatctaggagtacaaacacgctttgtcgttgctcttacaaaacctgagatcacagcaaacattgttcttcaacttaactttttcccttggtacatgttgtcatctctccagctccgtgttctggcgcttacacaccagtcctttgttgaagaacaggtgattctgttccaatttgcactactgcaaaccatgttttagagaaagtccttgtatgcatagtttacacattttagagacccagattagaaccacgttcacagcaaggtttgctcaaggaacaacgaatagctgataagcatatctgcataaaactcaagaggttctacataagattcagactgccacctgccctgggaaagctgcaatgtgctcagtagcacctcagccctggcattccccaagcaccaccagcagcgggctgacaagagctgtcttggagcaggacctgcacactctggtctgcctcaagctatttcttcactgatttctcactggccagacccagcaggcttctaagtgtgtcaatgccttgaggttgattacattcataactatttttttatttctttttaaattcttttttaagagagtcttactttgttccccaggctggagtgctcactccaacttctgcctcacaggttcaagcgattctcgtgcctgagcaactcaagtagctgggattacaggtgcaggccaccatgcccagctaatttttatatttttagtagagacagggttgcgctatattggccaggctggtctcaaactcctgacctcaggtgatctgcccacttcagcctcccaaagtgctaggattataggtgtgagccaccgtgcccgacccttttaaaacttttgtagattcacgggatacacatgcagatttgttacatggatatattgcacaagggtgaggtttgtgcttctagtgtgctttgacatcactcaaatagtgaacgttgtacccagtaggtaatttcaaccatcacccctcccacctcggcttttggagtctccagagtctattattccctttgtgtgtccatgtgtacccattgattagctcctgcagataagtgagaacatgcggtgtttggttttctgtttctgagttacttcacttgggattttatttgaatattttcaagcctagcctttggaagtcgttaccgtaaaattgtgtgctaacttccctcagtctctcgctctctcttctttgggaaggagctctccagcttcttggtctttgtgaataccctcattccagaatgacttgtgttccttcctgacccagtcactatgtcctgtggaagtagagggccctacacatttccctcaggatgaagagaactatttcacttttttgcaatcactgaacactttttcaaccttttctttgatggggagtcaaattgtttaattatttgactaggtcatgcattcacctggttaaaatttattagacaaaattattatgaaattataaaagttattcaaataactttctttcccccattctttcttccattcatctaagtcctactcccccgcagcaaataaacgcatagttattagattccggtgtatccttccatagttttttaaataatgattttctaaatttttaattactttttatttcaatagctttaggggtacaagtggtttttggtcacatggatgaattgtacagtggtgaagcctgagattttagtgaacccatcacccgagtagtgtacattgtacccaataggtagtttttatccctcacctcctcccacctttcccctcctccattataccattctgtatccctttgtgtacctatgacttggctcccacttataagtgagaacatgcagtatttggttttccattcttgagttacttcactgagaataatggcctccagttcatgtgagttgctgcaaaagacattactttgttcttttttatggctgagtagtattccatggtgtgtatgtaccacgttttctttatctactcattagtcgatgggcacttaggttgcttccatatctttctaattatgaattgggttgcaataaacatatgcatgcacgtgtattttgatataacgacttattttcctttgggtacatacccggtagtgggattgctggattaaattgtagatctactttcagttatttaagaaatctccatactgtgttccatagaggttgaactaatttacattccctccagcagtgtataagcatgtcctttttaccacatccactccaacatctattgttttttgactttttagtaatgacctttcttgcaggagtaaggtagtatttcattgaggtcttaatttgcatttccctgatgattagtgatgttgagcattttttcacgtttgttggtcatttgtacatcttcttttgaggaacgtctgataatttcatttgtccactttttgatgggattctttgcatttttcttgctgatttgtttgaagtccttgtagattctagatattaacctctcggggaatttttaatacacatacatacaaaagcaagatacaatctttcccctgtctttaattcaaatggcagcatgttctattattttcatgtttacttaaaatttacatattgaagaatttctcatgtggctacatggagggctgtctcattctttttcataaagtcctagaagattcttgcatggatgttcaaatttattcaacccaatcccactgacaaacttttaggttgcttccaggtgtttgctattacaaacattgccacagcaaataaccttgaacatactgaccaatctagacatctcatcaaccagcagaccctcctgcagaatctaaaccagcacaagctccccgtccttgtacaataaatagactccatcttctctattgatcatctgcttctccccattcaaagaaacaacaccatggaatacctagatgcttgaagtctaagcaacgtggagacctattgacttttatgttctccaatgactcctgcagattaaagaaagaaagctgattttatctctatctctccctatgcagtgttataaaatgtgggtctaggagagcttggcaaattagatgacggctttttaaaatgttggttatactttgaattattagcagcacgaatatagcgcaatatgcacataattagcaagatttctgaatttattatatatacttattcttgtttcttttaattagccagcactctacttgaaggtagtatggtgattcaaatgatggttaaatgtgtcagatggtgacaaaatgcactaacccgccagagtggaaagaagaaaagtctagaaatgccatgagatcgttttcatcctattaaatgcataaaagtttcttcatgtattggtcatgttataaccatggcacaatcaaaacatgatttattgagtattttaatacagcctgttaatgttatgcaataaagtgtattttaatatttaatgtaatcagtgaatttcaaacttttttcaggagatcttgtggttttaaactaaattaaatacagtaggtgacaaatgaggtcccaagagcatccctaaaggctgattgggcctgtttagagcaactagaattcaaaagctggttttgggccaggtgcggtggttcaggcctgtaatccagcactttgggaggccgaggcaggtggctcacctgaggtcaggagttcgagattagactgaccaacatgatgaaaccctatctctactaaaattacaaaattagccaggcatggtggctcatgccagtaatcccagctattcaggaaactgaggcaggaaaatcacttgaacttggtaggtggaggttacagtgagccaagatcatgccgttgaactccagcctgggcatctcaataaaaaataaataaataaataaagctaggtcagaagctggttttggttttggtgttgagattgctgtggagtagggggaaatgtgccattgcttgagaagtgagctgataagggaagttcatctgctcacatggaacaggcattcttgaggtcaaggtcattggttagttcctggatgaattgtatgaccatgatagtgagcagctatctttctgtagcctagcatgcattctttgttctcctgataatagtgtacccatttcctatgaggtaattaatgcctccattggatagagcttagtgagagtacaggtgtactgctctcctccaggtgtgagcattcaacccacaccaagtaaggagagttctcctctatcagtctggtttggtttggtaatgctgcataaccagcaaccccaaattctcagtgtcttagtgtaaagaaggtttctttctttcttgagcccatcccaagtcaaaagaggggctttgataattgtagtttctcaacccaggttgattcaggctgcatttcagtccatgctttcatgaagaggaaggcaataaaaagaaaattttgcagggtcttgtccctcagcatattgctccaggctgtcacatgtcacctttgctctaaatacattggccagaggcaacacatacagccccatccaaccacaaagagtcaataagttcatagtcactcaaggggacagaagaggacaatctggacgaaggcactgatgtcccattgacacatttcctttctgtattttgaattgtcagcagaatggtcttccaaaagaatacctctctttggaatccatttatgccatgggaaatacttggacctcctccagagcatcctttgctattgaaactctctaatcccgcctttcccaacaaaccctcacatccttccatgtccttccagtgggtccccttgcacctccatgagtaagcaagatccagcctccagttctcacaatcaaagagcccaagacactcagctgcactgccctgtgacatcagccaggcactttgtcaacatggctcagtttagtgcttccctgaattctgcaaccctaaggctggtgccacagtcacacaagagctgcatccacagaactaactgagaaacggagccccagagacggcagggtttgcccatgggacagggattaggatctgtccaaatcccccataaacctcccgcaaggcagagggaatatcagcagggagggtgaggtccctgcacagaacctgccatggaaatggaagaatacttgagccaaaagagacctcagagaggatcttgcctaatccttgcctggtggatgaagaggggaagacacttgcccaagaccacatgattgcttacttgcagaatccctaactcacacctaggtggacgtatctaagaggaaagtaaaaaacaaggaaggtgcacatctgagcatacctgggttgctaagactcaggctggggaccacaacagcccctttcactccactctggcttgagctggtcctactttaccccttcctttccccaggaaagaacctgcaggcagccaagaagctcagcctctgtctgaatctcccagggaccagctgctttctgtagaagcccataggaatagtttagaaaattgccaactattatccatcagctctaggaatgggaggtcaatgggaggtataacttggcagttaaacctccatttaagtcaaagtttacaacttagtcccaaggcacaagaagaatcttctccctcaaggactaaagcttgaatatcaaccaaaaaaaattttaggttacaggatggaaaactaattcacatatacacctgtgcacaaatttctacacatcaatcaacaaaagcaatgcattagtcctgaataatcacaaataattaaaaatatatatttttctctgcatctcctgaggctaaagcagtgaggatcttctactgcaaaattatcactcatattaacccttatgactgcttttgaaagcataaatcccatttcaggcccctccacaggagggcaagcttcacatagaccatgacatctttttggtttgcctacaaatggacacaattttgcaaagatttatttttattgtttgaattaagaaaacactgggttttcttccatttaagaaacatagaattttgttataatgttaaatatgcttttaaaaacttattcttcgaggatttctgtgcctctcaatttcagaaaaaagaaaaattcccgaatgtgtttggtggtaaaccaacttccaaacggtgaagtaaaatagcctgaaattaggaaagttaaaaacgtaaagttttaagttaaaaaaagtaataaagactccattgagaaagtgaaacgaaaatatttgcaaatcatgtatctaataggggactcatgtccagaatatataaagaattcctgcaactcaataatattaataaaaacacaaacagtccatttaaaaatgggaaaaatatttgaatagatatttcttcaaagaagtttaaatggccataataaacacaaaaaagatgctctatataattcatcatcagggaaataaaagacaaaaccacaatgagaatccattttgcacccaccaggatggctaaaattaaaaagacagatcatagcaagtgttggtgaggatgtgaagaagatagaaccctcatacactgccagtaggaatgaaaaatggtacagccactttggaaaacagaagaccctcagaaagttaaacattgatttaactttaaataaacatagagttcttcaaaaagggcgttgatgtgacttagcatttccactctgaggtatatacccaagagaattaacaacatgcatccacaaaaaacatgtatgtgaatagtcacagcagcgtcattcataatcaccaaaaagtggcaagaactcaaatgcccttcaactgatgaatggatgaacaaactatggtacattcgtgtgatggattcagccatagaaaggaacaaagcacgaatatgtattacaacataaacgaacttcaaaaacattaagctaagtgaaagaaggaagatgcaataggccacatagtttatgatgcaatttataggaaatgtccagaataggcaaatccgtagagacagaaagcagatgagttagggagaacagaatgattgctagtggatatggggtttctttagggaatgattaaatgttctggaattaaatagtggcaataatggtgcaaccttggaattatactaaaacccatgaactgtacactctgtaagagttaattttgtggtacatgaattattactcaacaaatctgcaatttacaaaaaaataattaccttcaaaacaagatgaagaagaaaaaggagaataaggaaagaagaagagaggagagaagaaggaagaagaaaaagaagagaaaaggaagcagaaacaatgctcctgttggtttgcatttcagagggaggtgctgatgccagcatgttccagcaggtcttgcagagctgtagcctgaggcttcctgcccacaccccacaaaagtcagcttcctgtgtagaaggagggtcaagagctgcccactgggtctcctcatggttttgcaatgctggctgacaagcgctcctctgaccacccactccaggcaggaccactccactaggggacactcctgctcctcgagaagagacccagtggccaccaggacagtgcagtaactctccagcccctctctatgccccgcgcagatcaacgggctttcttccaggggagtttgcccatctcctctcctcccttttatttgtaaaaattgcacctcctccgggaagccttattacccctatctaacttatattaactctaaaattccatgttttccaacgtgcacttctttaagtattcctcagaaaaggcgaccccgtgtaggattgcaagataaaacgtagatgtccaggaaaatctgatttttcagatagacaactgtgagtatgagtatttttatttcctcgaggacttagagacattagatacccctgcagggtgcactgcaaattcctggggagggttgtggcctgcagcattctctcgatttactgaaccacaaaactagaattgctggattaggcaaataaaaacacaaataacattttgagtttcaggtaaatgatattttatgtaagtacaccgcaaatattgcatggatatacttgtacttcaagattatggtttatctgaaatggaaatttcactgggtgtcttgagttttaactggcagccctactgaggtggcttattcatcatatagactctgggcatcattttcataagtgtgcggtagaagctcaggaaactgaatttgtgagaaaggcctcaaataggcaggtatgatttgtctaagggtcatgaaatgggagagcagtgtgtgtgtgtgtgtgtgtgtgtgtgtgcacacgtgcacatgtgcgtgaattggggccgggagcgggtggtgtttgggttaaaaggcttcccagaaatcccgaactctgatccatatcttccggctactttaaaatgactgaaacctcaggttcctttttcagtgctttattccacacaaactcatcttttaggaggctatttgacagtgcttaactgcgacccacattgtacatgctcataacaaagacaagtccccatctaccatgctgtaacttagaaaggcacaagttatacaacatctggaatctacccaagggaaaaaaaatgccagtctacaaatctagcatgctggaggcagaaaccatgtgctcagaatcattaaaatcacatttcactttgccacagtgcagctctgtccctggctgatggccagataagcttgctggcagagatctgctcttgtggtgctgagcgaaaggtccacacacctctcggttaatacctgcccaggcttaatacctaatcaccatcctcggattgcctctcaacactcattaccagcactcagcagttgcagccaaggtgatgggatttaagattaggacaaaagagtagtcacttttgttctcaagtgcaggtctcctcagaacatcatcgttcagcaaattcgggagacagcatttccactttctactgaagcatcctgtaagaatcagaaaagcatgacaccgttaaagataaacaaaatggccctatttgagcaagaggggctcatgctgtttggtctttgttttacgcccatgatgagtttaactgtttgttcatctccagcaccccagcctgaaactcaccccttgacaagcaccctgcaagctacagtgattctgaatcccagaagtgatgggctgtcttggagaatcccaggggctgtcctgtgctccaggcctgtctcaggactccttgggtggacgcaatctcctctagtcccctctaaagacttcttcatcattacgatggtgagtgtgggcaaaccaggtgggatagtttcccctgtcggcctaccagattagttgcttcccaggaggcaggtagaaagggaaggagggaggagagtgggaggagccaaggagaaaggaaagagagggaggacaagaagaaagcaagagagagagctcttagggaaagcagggaaacagtgacgaagggaagaccagctgtaccatattaggtaagtgatcatttaaagtcattatcaacttactgtgaatttcagatggagtttctggaagctacagtcttatttcctgttaggaattcattcatgtaacaaatgttctatgggccgggacactgtgcttggggatgcagatacacccctgaatgtagccatttgcattttaataaggcaaagcaaacaatggacaagtacactcacagataagacaatttcagacaatggtcatgctggaaggaaatggcatggtcatgggatagagagccagaagcaggaggagatgttagacagggagcaatggacagggaggagatttagaaggggcctcaaggagagagcgcagtgagagaaggagccccctgtgtgtggacctgggaaccaactggcttggcgggtggtgccatgccacagaggtcaacgtggctggagtgctgagcaaggggacaagttgcagggcaggagtctaagggcatgcagactggcaggtgctgataaggagttggattgcattaattcaggactgtaggaaaaatgcctctgtgatcagacaaatggtcaacgtctcttgacaggaaaacattggctgtgacgtgggttgtgcaatgaagcttccaacccaggatctgtttctgaatggctgtcatggagcagagagcagaggctctgcatggccccaacacttgtccctcctccaagctccgacattaagaaacatgcctgcttcctcgtggaggagggaagcctggtctaaggtgtgtgctacaggagaggaaattcacaccttcagttgcctaggtgacagcttccaaagtatgttgcgggtctaactggcagcctggcaaggcctctgagatgggaaaaagggagcccctttccattggagtcaccatgattggaccaaattctggtcctcagctcaggggcccttgtttctggtgaaatctttcagctatatgccaccagaccccaaatatgtgtctctcccagggctaaccctggaggctgaaagaaaccagaatactcacccagcacggtgactcatgcctgtcatcccagcactttgggaggctgagggaggaggatcacttgagcccaaaagttggaggccagcctgggcaacatagcaagaccccatctctccaaaatttttgaaaatggctgggcatggtagcatgtagctgtagtcccagctacttgagagggtgagacaagaggatcacttgcctctcaacccgggaggttgaggctgtagggaactattattgcatcactgcactctagcctgggcaaccctgtctctaaaacaataacaacaacaacaacaaaacaaaaaacaaccaaaacactattgtctagtgtccaggacactagggcccaggatgtggcacagagcatgagagccatctgcagcagcacctgtgcccagctgctcatgggaagccatgtggggtaggaggctgacggacagcccagggcagggccaaggcactgaaacctcatacattctagtcagtcccaaacgagcaagaaccttcagcccaggtgagtttgtgtctcggtggatatacagtgtctctacccatgagcagtacttaaatgcctgcacatccatgtcacccacttcatcttctatcagtcactacaagcaccatctcctccaagaaaatatgttctgatggaggaaacactggatgtggagtcagtggcctgggactgcctagaagcttcactgagtactggctgtgtaacctcagacaaaccactcaccccctctgagtctcattttccccacttatacattgagtctagcaatgcacacctcccaggactgggtataaggattagagtcgacgaatgcagggtacgcagtggctgatatttgctaaggaactgcgatgttctgattcaatgtggtggccagatctggagatcctgagaccatctagtcatggttgctctagggtgtgagagatgaaattcagggaaggtagaggaaggttcccagatgtgacagcttctgcagggagtgggattgccatgggaatctccagagactggacaaagaggagcttcactgttttaaaggcatcagatggacagatgcagagccactttcctggtaggatttatgactccagcaggcccccggctccaacagacagctcattctggaggaaattaggtgtcaaatgcagtgttctggaattcttagggcacccattggcagagttttacagccattctggctctaggccttcgtcaacttgtcaaaacattgactttcctctgcagctcctaaccaggcaagcaccaggcaatagcaatgagtaatgcagctcttaacacctcagtctgaaaagatgagacacctcagaccctggttcttctggagtttggggcagttatatgacactgaagtcatttgctccttgtcacacggggaggactttctggcttttcaggctggcaaaagactttccccaggtgagtagagctttctggagttgagacatctaacatcacatcccagatgagaaagagcagatccatcccactggccacttgcccccacaaaaatgggggtaaggaaggcagaggattgtcagcaaagctctgaagagcggctctgcaccaacaggcagccggcaggccccagcctggtcccacgacttgtcactgaagatactaaacccgcagccgctgaattcctgtcctagttagggtgtctcttaaagcagaccctgaacaatgacttgggtgcaagtagttgatttgagaggtgacctcagggaacaggagcaacggagcaggaggaagccagtgacagggtgcagccctgtgggaaatgggggcccaatctgcagggccaacgcagtgttgtgaaattcttcgagcagtctctggagagcaggggagcatggagctcagaactgcccctctgaaggactagagattgggcgtggatccccacagcatcccctgctggtagagggttcatccttgagtgtgttaacccttctgctcttccagactgtgcctctgcatggctgattagactcccacagctcaaagaaagctccgaatcaaaaaagcagaggttgcaggctgcctgccagaagtgagaccctggtgatgggcctggcactgctcactgcagtgctgatgtcaggagggcccaggatgtggcacagagcatgagagccatctgcagcagcacctgtgcccagcagtgtgctaagcaccaaatgagagcagaagtcattgtgaaaaacagtgcccagcctcaatgactcctaggaaagtttggaatagacaagtgacccccggggccccagcccagaagcctaagttagaattgagtaacaagaagaaaagatgctgttatttaaaacaaaatttgactgcagtggctgcagcactctcaggcagaggccaagttcttcgtaggggtaggtggcctttttgtttagaaacatacttcagaggatctctttgtgtgtgtgaaaatataggccccagggcacagtgggaaggagaaaggcagagcgctctgctctgtagtgattggagtttttgtcttgtttgtttggagggggcttgtgatgcgaagaagaaaattgacggagcttgggacacaaaggtcaactggcaggagtggattggaccttggaaggaaggcagtcaggagttactccctgtagagggatggtcagggggccacaaggcaaggattgctcacaaaacagccacatcaagtcggtgcattctgtgatatgctgatattaactatctggtgtccctgacccttcggtatgaaacatcttagcctctcattagttatgctttgggaaacaaagaaagaggaacattgggggtgaattaagatagagagaagagagcagccatggaaagagagtgggggacaagaactcagcagggcagatgcaggtaggtgagctccaaaactgggtctcagcccaggaggactcttggcttcacccaggaaagcattcaagggtgagctggtggtatcagacacgttttatggaagctgcagtgcacagcagcagtagaaggactgctccttgcagagcagggataccccacaggcagtgggcccagagtagcagttcagaggcagtgctgcactcatatttatacccacttttaatgacatgcaaattaaggggagggttatgcagaaatttctaagaaaagggtggtaactcccaggtgttgccatggcaatggtaactgacatggtacactggtgggtgtgtcttacgggaagctgcttctgccttgtacctgttttagctagtccgcaatttggtccggtgtctgagccctgcctccaaagtcaagtcccgcctcctatctcagggctgagtatccagggatatgtgctcccttaggaatcctcggagaagttgagaagacactagacatctcacagcatgcagagtaggggcttgagtctgcatatttgaagttggaggaaagtgtggcccccttaagcctgaagaacacaggactctgggctgtaattcagatctatttggtacccagttatcactaccaaaaacgcagctcagccgggtcccatgccagagagggaagcccagggatgacaaatgtggcccctgccctcggattatgccaatgtcctagggcgttccagttgtcagcaaccaacctggctaagcaatgcctgagatggcctggtgggaggctccataagctgaccagagacatcctggaagacccccaggagaagggacatcagaacatcagcttgaatgatgagaaaaaaatagcaataggtagaaagcgagagagaagaaactgtgggcaaagaaaagagaagagtttctggagggagagaccctcatggggtcttccctaggccaccaggaacacacaggtgtcaccttctgtatctgtcaggggtcttggggaaactgaggcacactcagagtcattgagaagagtttagtgaagggactgctcacatgggatagagaggactagagggatgcagtaaacccaaggccacggctgtgcacatcactactgcctgacccacaggggacagtgccactgtggaagaggccacaggaaggagctggggatttcagagaggagcccaacccctgccacttttagcctagcagggagggagcagggcagatgaatatcccgatctctttcttccatccaaccagtcccgcccccattgactaaccgagctggaaacagaggtcacgggagcctggtcagtgcagccctgcagacctagacccacctagcgtgggtgtggagaggcttccggagagcatcctgtgtacttgctgacaaatcagccacctgtcccttgcaagctgtccagcatgagctggcctcatgcgctgaagctcagccctgcttttagagaggtgatcagcagagtcgtagattcaggaaaaacgtgtgggctgcggcatgccaccgtaccctccctttgcctgatacctacaggagtctgtgttactcaggaggactcaggaatctggagattgtgctcttagatggaaaattggaactaggaggagaaagtaagtgtgatgtgcacagatcccaggtggcctcgcattttagaagtaaatggcaatattttcaaatcaactggacgtaatattggaagccagcagagcaactctccagctaggagtctatgcttgaggacctggcattgtcagcaacctggggggccacactgcacccacacgagcacaaggcttaccttcggtcagggtctcccagacgttgcccctggggtggtgatttgtgggcaggtgatttatcaagacaggagaacccagtagggaaaagagggcaggagaggggaagaagccctgcaagatgctatttcaggtaggtctccagcctcagccagaccccattgagggggggcggggtctggaatatcagctgcatctcacagtctgcccagctttgagtcagaggaactggtttttcacacccccacaggatgaagggcaagctgccaggcacccgaggctccttcatgcttgcagctcaagcctccaggggccaaagagaagtcctcaggaggctgttggtgcagtccacttagagcaaagcacatggccgctggaggatgggggcacagagctggcaagagtgatccacatgaacctggacaggaccttaacagtgtctgctgaggcccttgccccagctggccctgaagtcgaagtctggtttgctctgttttgttggtctgtgcagtggagaggaaggtgccaccccagctctagttctccacgtcacttaagaggtatgggatttcagcaaggactgaacaatgctgggcctcagctttctccttcatcctgtgaagaccttcaatcttatctaccttgggggatgatactgtggttatcaaatgtcagaggaccttgaaggatggaaaacacgtgtatgtgactcatcaggctgtgccattgcaaggtgatgctgatgtcaggatatttttgtctgcaggagaatccactactgtatggagcttgtcctggaaagccattgcaccccaccccaccacccccaccatctctcagaagaggtcacaaagagcattttgttacaacataaccttactcaagaaatcactcaaaaaatgcacataggaaccactgaaacatttcctgaatttaaaagaatgactcagcagagcattcgtttgtgatagaactgcttcttgaatttctcaaaactggtgatgttcacaaaggccaaaatgtgtgagcattctgccaaaaccaggccaaagtttgctgctgtgctttgtatttaaaaagaataagaaaatgtatagttcaaaaaataaaattctaagcccaccaactgactaaacagatcccctcttggccaaggggaccccagagtaatcaggaacattgagttctcggccatgatgggatggggagcatcagacaagtctcgttattcccttcccttgctaaccaccactaggctttctttcctaagggctaaacacaaacctacccttccaacacagtccactgctgtgatcaacccactgcttgacgctgctcctcgtttttgcctgataagagaccactgaccatggggtggctctgcctagtccacggaggatgcacagtgagggttttggtgtcctctgctttaccttttgacatcagagggccaaaagttctacccttgggtcatgctaaaaccaccatttttggtacagggggcccatgaaggggcatgcagctcacttgtgcatgtgcatgtttcacctctcataaatattcatgactcctcctgcagcttattgaatatgtatattcagccatccaactcagcacaaattcctgttccctttgcccctccctgaaagtgtctgtttctggcttctcatcagaggctacgcttcccagccggtcagagtggccaccctgcagggtgcaaccctttatgaaaaacaaagttcttctttccaaaaggaaaaaataaagaaagaaaatttgtagtttaacaaagacaattagataaagttaacccactggagatccccgtcctgcaggccttggtgctgattgatctcctgcccaggacatggccacacgggggctagtgggttggtgacctgaggagcactcctgagtgacctcggagttcagggctgcctccaagaatggctggtgcataaagactactcagaccaaagctgagcactccaaagtatgaataatgaaggacatttgctggctcagtggtgagaacctggggtgtttaggctgtcactgccaatagtccactattggctgggatcagaagagcagaaggccaccattttactgatgggaccaagtgaatcccagggtctggtgcaacctggagtggaaggtgcagagatgggcagcaggtccccccgatgcaacccttctgcatgttgacaacaatataaaaagggaatacctgcatttctattttgctcttcagattggagacctggttgtattacactgcagatttactctagccagtcctcagatattgcctactacttaaagtgaattgttaccaaaatgttcagagaaaaccttagattaagcgtattgactatgtttcttctttaagtcatagttaagggcaataacaacaacagagcagctgagtagatattttctgctcatcattaataataacccttcggctgatggatggatggccctcccggtgatgaagagctggcagcactcactctgtggcgggatctgttcctgggagggcctgtaagatatttgatttgagagatgcctggctgctgatggattaggagggcctggtagaaacacagtggcatgaacaccaggaccataaaaagagaagaagagtacaattatcttgtatgttcccttccttctctcactcccggtagaaccagagaagggcaagccgagaagcatggaggtcattccaccagcctgtggactcctggcccatccagtcactaaagctatggaggagaaggcagagagacatggacctgggggaaagaggaggctccctgtacctatcagctgtagggaagaagactctgctccacacagtcacttgggattgaagctgatggaggctccaccatctcatagctacttcatctggaaccagcagcctcctcagcagaaggagggagcaggaagggtgtccagggtgttttcactcgatcaacccggaatgagaggtagcactttgctcacatttcactggccagaattaggaatgtgacctcatctaactgcaagggaactgggaagcaatgtgcccagaacgagtggtctgcacacattgccctgcttccttacctttcattcaatcttcaattgcccagtctaggctgttccccaccacttataccagcacagcctcctgtttccaaacccagtggtcattctcatgtttcccaatctatgggcagcactaaccccagctactgcccccacctcgatctagcctggcctcagcttctgcaatacctcattctgctgggcttccttccctctctctctgctctgtgagtttctcctcacccaaccttctctaaatgttggtgtcttctcagaacagatcttggccctattgttttttctctgtatattctcttgctaaataattacatcagttccatagctttaaatggcatctatttgccaatacatcttaaacacagatcgcagggcagagttctatccctaggagactcacacttttcttctccactgcttgcttgagagcccacagtgcatcatataaggaacttgagtctcccacacttgagtcaatcacggcttcttgtcgtaattggaaatctaggagtggcacatccttgacagctcccttttgctcagccctgaatataaaccatccatatgtcctgtagatttaacctccaaaatacatcaaaggaggtctggaatcaacaaacctcaggctgtctccactgccactcgctcagtgccaatcttgtcctgggcggcactcggggttcccccactcgctccttgtcaagtcattctcccagcagcaccagatttgtctataaaatgcaaaccaaatcatggtacttcctgcttcagtccctgagctggcttctcactcctcgggaatcaagttcaagttcccctccatggcccacatgaccatgcaacccaggccctcctcggcctcatacatgctaccctcccctccacagtgtgttccagccacacagagctccttgtcctgctctgcaccacttgccccctttccacaccgaggccttgtcacactcagtgctgtatcgttcactaaaacgtcaccgccttgatgagctggatgcacagaggcattgaggagaagtgcatctggcatctccccaaaacaaaagacatcactgtatcaaaagaatacctgccctcatatgttcttcccagcaccattcacaatagcaaaggcatgaaatcagcccgggtgtccaccaaccgaagacgggacgaagaaaatgtagtgcatatgcaccaaggaatactacttggccataaagatgaatgaaatcatgtcttctgcagcaataaggatggaactggaggccattctcctacgtgaaataactcagacacaaaaagataaataccacacgttctcacttaacagtgggagctaaataatgtgtacacatggatgtagagtgtggaatgatagactctggagacacccaagggtggggaggatggagggggtgaggcaggagaagttacttcatgggtaccacatacgttagtccagcaatggctacactaaaggctcagatgacaccactacgtattatatccatgtaacaaaattacacttgtgcctcataaatgtatacaagtttgaataaaggacaactgtgagtgtcttctgcacagtttgcaaagcacacgttcccagcagcatctaccttcctacccagataggatctcatcacatggaggtcccatagccatcctcttgcacccaagggtggtgcagtggaccagtggccccttggcagcctttctgacatgaaaagagggtctcagctgccctcctgtgatccatctgccaagtcacacaatgtcccgtggccctgattcctcctaggatgtgcctgccctatgttaggtcctgaacacgtgttcttgtttcttggtttgtctcaggacagcaaggacacttggctgaggaagcctgaatttgaaaattagggttaaaaacaaatttcaccttttgctcagcattcttctcttatggacccaaggaaaacctctgtgttggttaaacactctgtttgtcagcagtgagaaaacctttggcatttagggtgtattttgagtgtataaatcatgtgtttacagtgaaagatgcctgtagcagttcccgagacatcctgggttcctccctgcacctgcagaagtgcagcagaggcccctgtggtcacagaaacacacccacctcctgccagcccacctgcacacctaatgccagttcccagtgtcagaggagggcttttcagaaactcagacctggacaggtcatcaggggctagagagccattcccaggccctcaggccagctggcgtgcccaggagtcagtccccaggggcagctcatctccagagctagaaaaggtactgtcagcaggccacctcttctcagagctgagcacagattactcctatttttcctcctgcacacggagaagcagagaatgccagaccagccggatcccgagtgcagggcactgggggcagagcatcgcgggggtccagcctcgggggtgtcagtgcctgccagcacccagctcctatctttccattcttggaaacagtggatggtttccctttgggaccctgctctgccccatcctcaggccctgtggtttgggtgtcttgccccatgccccacccctactcccttcccacggccagacgcacgcgccatgacaggccattgcagcaactcagcccacagccaggagcatgcaggaggcaggcactcttgcttgagtgggcagaggctgctctgggagggaatgggaagtggaaacactgtcggagtctgtccaggagggagctgttggtgctccccatgcagaggaaaggaagaggtcttggctctttcttctctctgtcagcatggagagccaacagagagaagaaagagccaagagatggggagagccaagccctgacaccagtcttggtgtcccaggagccagcagtacctggcagtagcatctctgtgacatgtgccaacaccttcctcccttgtgctggcctcacgctgaggcagacagtttgccgggagattccaggtgtgaggcattgggcttggctttaagaaaattgctcagagagtgaggcctagggaaggcgggcaggagctggggcccaggccacaggcatgtgtccaaagcctccactccttggcgggggctggggtgtaacaggctgctcagtccaccccatcctctggcctttaaaccataggcacagactacagcagcaagtctttcagccgctgagccccccagcaagtggcacaggcagggttgtccctccatcctctagcacaatctccctcctctccccgcagccctaaatgcatgttctttcctccacccctctgcttacactggacccttagcctgatgtgctcttcattccctttccaccccttccccagaatctgccatccctccagacctggctggagtgcctcctcctccaagaagccttccctgactagcacagctcatgatttgaggcactgggtcactgcaatcatcacccaaaagtgcacagtccacaccgggttagattctgtcctaagcaactttaggctggctgccctctcaccagagccagtgacctcagctagcagccagcaacagagagattatttaacgttttcaggaggaaccattctggccattcagggagaagtcttcaagaagacctaggaccattcccaggacctttcccataagatatatactaacatggacagaatgccatgtgctagaggcaagcagagtgagtgaggcaaggaagagaggagagacctcaggctccagggccaggcaggcctgagtttgaatcctggctctgccgccggctgcctgtgtggcctggtctagtcgcttgaaatctctgagcccagtttctcatctgtggaatgaggatgattgtgactctatcataggcttaagtgagaagccatggcttgaacagggtggatgctgcgtaaatactccctgtcgattcctgggggacagtagagcaccgtggttgaaagaataacctaagcatctctgaatctgctccatgcacctctcagttttttacactgtgatcccatttaatcctcactgcaaccttataaagtagcaatgcatataatccccagtgtacagttgaggaacccgaggtttagggtcatacccaaattcaaactcctgaagatggcagagccgttttcaacccttagcctacccgtcctctacttggtggcccagcatggtcacagggccaccctgcagtggtgtggtgcctaagagctcaggaaagagtcagactgctagatccctagctcagctgtgacacttgctattcgaatccccatctctctgtgcctcagaggtcttcattctctatctgtaaactgaagataaatacactatgttttgttgaattcaacatgccatcacttgtcaaatgtgatatcattttaaatgccactaaaacagaaaaaatgcccaacataacgtatttaatagaagttctccacataaagccaggacacaaaggccgaggcccctgtgtatcagtaaatgagaaatataaacccaccatgtaaacaaagtgacaaggaaattggcatgtctcaacctaggcgccaagtgaagggagaaaatattcttctttgacctgagtaccagtttgatcccagaactggtactcaggcagatttgatgtctgagttcacacggaccagtgtagtccgaaaaacccaaagtagacaatttcactttgacctcatgttggtagtagctctgtgaaacagaagaaataaacacaaatccattctcttgaaattagatctcagttcaggcccacagcgaggctaagatgctaaggactgtaaaacccacgccagtaatttcagaaatttgcaaagatggaaaaaacgtgttgtatgatcattgagatatggtagcatctagctatgagctactgtaaccaaatactcccaagtctcagcagattcacacaaccaacattcatctctttctcaagtaaagtccgagtccctgaatagtggatgagtcagagaactgggctctgtccatcctgtggccccacaattttcagcacacaacttccatggtctccaaggaagggaaaggtgtaggattgtgtctgggaggtttccacaggccaggcatgggtgtgaaatctgtgacttttacccacaatgggttgggtagaacacagtcatatggtcatgcctgggggtgctgggagctgtgggctacacctgtgcctgggaggaagcagaaagaatcttggtggacaggcagacaaccccggccacaacaccccatgggaccagagtgaaactcttggaaaataattgttagcagcagtagattaaaatggggcctgacaccacacagagactcagtcaatgagtgctccagctatgattaataatgagaacatctttcatttgtcaaagcgatgtatttttgaggatggtgctcacttaacaaaagcagcttctcctggtgtttcctagtgacttcccatagtggatttcaaatagggatttgaatttcaaaaaaggtaatctgtgtgcaggagggcctgggtggtaggaggctaatattcgcgttcacaaatattgcattcttttaaaccagtcatcctcacattcagtttccacaggaaagcttaaaagtgtgagttctagaattagtcggcctggctttgaaccacagctctgtggtttactagctccatgacctcgagctaagcccttggcttctcactaagctttggtttctgcagcgtgaactagtaatgaaacaactgcctcagaggctgttgtgagagtgaacacagataatgaaggtaaagcgcacagcacagagagggcacacaggggctctcagcgcgtggggtcattgtttttcttgtaatttttattaatgccctggaagccatttttcctaaacctcatgttagcaaccttgggtttgagccatgtaaagtcctgtgcgctcccctatgccatctcaggtttcagaaactctaccttctgtgcggactgattgtctgagcaaatgctagatgctgggtacatatgaagctctcatgtggacagccttaccaactggtggtctgaacatttatttccaattttaacaaccctattaatagttttatcctgcgaaacaactcaaagcattatagaaactctagtgtaaaacctcacatcactcccagttcccaccgtcggctgagcggaggcgtcggtcacatccatccggtttcttttcttaatgtctagccaaggcccacagagatgagcaaatgcctccgatttataaccaaatgtaaagggcagctctgtcctctctgcaatgcaaaaccaacagctcaatagttggacaaccacacctttccaatagtgtcaagaacgacttctgaactctgaaaattcagtgtttggtttatgactccttaaaatgttttacccatagctcctgggacaggagccagaaactctgcccctgtagaacccagcagagaagaagagctgagggctggtagctgactcacagccagctttctgatgtgcatggtcagggaggaggtgctagggtctcagccttcccttgccccacacttcagctgagaacctctgaagaggcgaggtgatgtcaggaactcagcagcacgcccttgctcctccattccagatgtaagtcaactcagtccctctgcaggcagcaagcattggctttctgtcaatatccattcatccaaagtgtcccccaaaaccaccctcttacccctaatctcagtgccttgttgaggatggggctgatcccacccctagttctagatctaggctcaaaccaccatcaactcccacctctgcgagggctggttaagggatggactcgggacacatcagagacaagccatgctaaccccaggacctcgctggagcagccgggagagagaggaccttgctttgtcctcctggacagaagcgggctgtgtctaccacactcacctctgttctctatccagggcagaaactgagaatggctcccacacacaggaaaggaaatccagaggtggaggaagggagaaaaggagagacaaggagagggaaataaacctggtccagatgacaattgagcctcttatacagatgagcctgaggccagatagactttgcagtttagggacctgatatattcccttggaggcactggttaagttttctatcctgtagccaggaaggagtcttgtgtgatgcccccatagactgtttgcttattgcaatggctttgcgccttcagctgtcctgaacccaaacctacccaaactcctacccatctctattcacaccacccaaaccagctatgttgtgagcctggcattgtgcaaagtctggaggatgcagagctcccatccctccactttaagagatgtcagtacagcagtgcagtgcaggaaaggcagagctagagctgcgcacaggggtccaagaaggcttcctagaggaggtgacactgatttccactgaaggacacatgggagtttgggaggtgggagtgaggagagtcatgggccagaggcacatagaggacacacagcccacagaggacccctttcctcactcctatggaccctcgtgcctggtttcctccttgttttctgaagtcaacctggtctccccagatattttcttcaagtttcctaaagttagctgcagtgtggtatatttcagagacaggaaaggtggccacgtgcacaagtggcatccaagctccagcctctcccaaactccatgggtgccaggtctgagagctgggagttcaggccccatgagggactatgcctctcctgcctgcatcatggttctcttcctttttgctaatttcagaaatccacaacataatggaataaacatctatgtgcccggcatccatgattagcaaatgaaaatacgttcttaattgtgccgaaattcatttttcataaaagaaacagaatttcacagatttaattgaaatgcctctccccacaaacattcttatattttcataaatattttaattttcttttggtgaagagatatatctagtcccaactttatacagactgatggatagataggtagattgaaatgactgatgataaagatagatagattgattgaattactgatgataaagatagaatagacagaaagatgatagatagataaaaatagatagattagatagaataaacagacagaaagtgatagataaaaaatacataaatatatatagatggataatagataaatagaaaggacagataaacagaaagatgatagataaaaagatagatgcatagatagatgatagataaatagatagataaatagacaatagataaatagaaaggatagataaacagaaagatgataattagataaaagataggtggatggatagatgggtgatagatagaaaggataaacaggcagaaagatgatagataaaaaagatagatgatagatgatagataaatagaaaggatagataaacggacagaaagatgatagataaaaagatagataaatagatagatagaaaggataaacaggcagaaagatgatagttagataaaaagatatagatagatacagacagaaagaaagattagattgatgaaaagataatagaaagattgatagataaacagaaagacagatgatagataaggtgaatagaaagagataggacagatacacagatagagagatagattagtcatagatatagatatacaacagacacattgctttgtgagttgtaatttacataaatgccatcacagcttatttctcaacttgcttcttccatcagcattaatttttcgagatagatccatgttgccataactgctgcgtagtagtccaatacctgactatattggaatttatgagtccagtctcatgctcagggctatttggtcgtttcttattcttcataccactaacaacgctgctggcaatgcccttgtgcacatctctgagaaatgctctggggcacgtgataaaaacacaggtctgggtcacagaccatgcacatctttgattttatctcatgttgccataaggagagcagtgaccatgctcattcactctcctgccagctgagcgtgagttttccagctgcttcacttcccaacactcaggataaaccatctgactttctgagttttgtcagttgggtacctgtgaagcaggttagcacctttgtttgactttataagcatttttcatttatttttgttcattgatggtctctcttctctgaaactcctggtcttcaccttttctccatttggtttatttgtcctttgccaagaaaattcacatgtaggacttcttgacatgttctgggcaccgcttcctcacctgtcttcttccactctggccttatttgttaacttggtttatgatgtctcttgcaaggtagatcgtgtgtgtgtgtgtgtgtgtgtgtgtgtgtgtgtgtgtgtgtgtgtgcttgtatgcatgtagtagtcatcacagaaccatcttttcctttatgagctgtgttttgtgccttgtctaagaagtctttctctaccccaagatgataaagacgtgattatcaatgaccttttcaaggttataaagttctgcttttcagatttagatcttgtatccatgtggaaatttgtttctttacaggatgaggttagcaactgattttaattttcttcccataggaaaactaatatttgagtctcctagtgtgtactaccatctccatccatcaccaagttcccataaatgtgtgggtctacgtgtaggccagtgcttagcagacatttttgttaaaagtcaaatagtaaaattttgggctttgccagccacatagtctcaatcacaaagactcaactctgctggtgcaggggcaagcagctcataagggaatgaggacagccatctcatctgttctgctaatatatttatcttcaaggcaatgccaaacttttaacacttattatgacttcctaatatggcttgatatctgatagaggaaataccaaccctttctcttccttttttagaattatcataactaatcttggccttaagtcttccacgtaaattttagaatgattctgacaaattccacaattttattttttttgagacagagcctcgctgttttgcccaggctggagtgcagtggcacgatctcagctcactgcaacctccacctcctgggttcaagcaattcttgtgcctcagcctcctgagtagctgggattacagatgcacaccaccacacccagctaatttgggtatttttagtagagacggggtttcaccatgttggccaggctggtctcaaactcctgaactcaggtgatccacccacctcagcctcccaaagtgctgggattacaggcatgagccgccatgcccggcaattccacagaattttgtattgggtttttaaaatggaattgcattgaatttttaggttaattgggagtggggggaacacataattataatatgtgttcacatcatcaacatgtttgtttggtttatcctaaggacacatacacagggcccctctacctggtgtctgattcacatggtgacaccacctttcccatcacctataccagaaagctgccagtttcatccccaccttccctcttcttcctcctacgcagccaggtacagcattgcctttcccctctttctggggtctcctctgtctctctcatcattgctggcctcaggggtctccctccctccaatcttcttcctcccatttcatctccatggcgcaccaaagagccctctcttgtcacccacgtaccatttggctgaagcagagctcaatatccttagcacaacttgccagaccttgtttggctcctaacctacttctacccctcaccacctgacccgctgccccctcaaggcacctgacgccccagctgcacagacactggcagctcctcccattcccatccttcctcaagcctcagtgccccccacccagagcaccccccatttttacccagccactttctttcttttattttttaaggagtcttgctctgtcgcccaggctggagtgcagtggaatgagcttggctagctgcaacctccgcctcccaggttcaactgattctcttgtctcagccttctgagtagctgggactacaggcacccaccaccgcacctggctgatttttgtatatttttttagtagagacagggtttcaccatgttggccaggctagtctcaaactcctgacctcaaatgatctgcctgcctgggcctcccaaagtgctggggttacaggtgtgggccaccatgcctgctctactcagccactttctattcaagacccagctgggccatctctggctctggggctcacgcctcactgccactgttcccagtgccactgacctcagtcactgcacatgtcacttggaagaggctggctccacgaggatggggcaccccaggacctggcatgtggaaggcactatcagtatgggttccttaaaggagtgaaagagcagatgttgtgcacagtcaggaacagaaatggggcagagagaggcaggtatcctcatctcaaatacacgcttctcacagggacagggctgagggcacagagaggcaggtgtcctcatctcaggtacaaacccttctctcaaggaggggtcagagagtgcagagaggcaggtgtcctcatcttagatacacacacttctcccaggaaggggctgaaggcacagagaggtatgtgtcctcctctcagatacatgcttcccccagggagggggctgagaatgcagagaggcatgtgtcctcctctcagatacatgcttctcctagggagggggctgagagtgaagagaggcaggtgtcctcatcttcggtgcacatgcttctccctgggaggggctgagggctcagagaggcaagtgtcctcatctcagatacacacgcttctcccagggacgggctgagggcacaaagaggcaggtgtcctggtctcaagtatacacacttctcccagggaggggctgagggcgcagaaaggcaggtgtcctcatctcaagtacatgtttctcccagagagggactgagggcacagagaggcaggtgtcctggtctcaagtacacacgcttctcccagggaggggctgagggcacagagaggcaggtgtcctcatctcaggtacacgcgcttctcccagggaggggctgagggaggagccagccccaccatctctgtgccttgctgacccccagcgtcctgccctgaatgagcaggctggagctgacagggctgaaggggatgtctgcctgcgggagcagaaggcatgcataaaaatgcaaatgccaggctcctttcctccctgcgctctgctcgtttatccctctcagacagataaaaaggaaactgtgccactgaggacagagcccctctgggtaaaaaagcaatagcaaagtgacaaatgtcatgtgggtttaagctaagtcccccatcgttacaaacccacagggaaataagcctgacaaatgcgcagccccgctcgctgcaccctcttcctttgaaataacttgagccctgaaaagggagaaagaaggaaataactcaaaaatgttaaaagcaaagtttctgtctgcaaaccaaatgggctgaatttttataggctcgtttggaagagcatgaaaaatccagttgtcagaggagcctctctctgccagacagcctcggggagagacacaaagggactacctaaaacctaagctgctctgctcccctgctcccatcccagggctcagcccgctctccccagcccctacccttgtcctgagggctgctgagccaaaagggagggctcctgtgcagggccaaggtgacctggagccgctctgatcccaggctcgcggagggcactgtggaggaccgtgcaggaagacaggttgctcctgccagttcaatgcactaagaccacacggctcccctccgcacagccctcgctgagtgccaggcactgctctaagcccttggcatgtcctttctccttcaatcctcacagcaactctatgagggaggcattatgattatcccacttcccagatatggaaactgaggcagggaaaggttcaggtgcgcaaatggaagtggaggatttgaacaaacacaggctctaaagctccctgccacagatgctggcagggtcccacccggtgctcctctttactggacagtccacagcacagcacaactgctaacagatcacagctaccccttccgagagaatccactttatccagagatgcctgggagatcgggaccacacgccagggggcttacagccaagcactgactgactggtatacaaaagccccacccctgcacctcaaagggaagagaacgctggtgctgtcccctcccgagtccccatcttagcctggccttctttccccacaggcttctcctgagagcacaccctcgacaaaacacttgcacaagagtccatatcacaggccctgtttctccagaacctggttacacaccagcccacagacttaaattagtccatacattcttttttctctctgtcccttaagagatagggttttgctctgttgcccaggcaggagtgcagtggtgcaatctcagctcactgtagccttgaacttctgggctcaagcaatcctcccacggcagcctcccaagtagctgggaccacaggcgtgccccacaatgcccagatcatttttttatttttatttttactttgtagcagagatgggtctcactgtgttgtccaggctggtctcaaactcccggcctcaggtgattcttcttcctcagcctcccaaagtgctggaagtacaggtgtgagccaccttgcgcagcccatacattcccatctaaagtgctaaatgctgtgcctggcacacacagctgctcagaagtgatattcacatcaatgatgagggcccccttcattgttctcactccctcattcatccacaggccatcttcggggcatctgtggcttgtttagtaacttagtaacttacactaggagttgagaatgaagagtcatggggaaaagtaacaatcaataaatctactttttttcctacaaatccttccaaattaagaggtatattcatgcttcctggagccaggagtgcaatgattttcctcctccctcccccagatgaagggcccctcctcagtggagacgttagcctcattaccagcccagactccacttaagggtttgcagttggcaggggttcaccccccttgacagcgaggcattgtgctgattggggaatgaaaacagaatgtcagagacctgccgtgctttcctttttgatcaagtctgtgcagcagaaatgagagagcatccggcatcagcatccagactcagcgcgctcatcccaccgccctgcagtgcacctaatgaatctcatttactggcaaagacaatgaagtcgcccacatggcacctgccggtctcataatgaatgtcctcccccagccgttgggagtgagccatctgggagcggggcgccataattgggccagcacttgcatgagaacagcctccagtggggaatgttgtaagacacttgtcccagagatgtcgtaagagggcaggaaggagctgttttcaagggaagttaatggtccttagcagagggatgtgaagggatcatctccctaagcaaagccccggcacagctctgcctattgtgagaggtacagcagcactggcttgggacaaactgtccccatggcctcctgggaatagagctgctttcctggggaggcccacggccatgtggcagaaggcagcaggtgtctcccaccaccatccacagaggcctggaattgcgatgtgaagtgagccatctctttgcaagggaatctttggaggggcaacatctttgcttggcttagcgtggatgatgctggcctgggagttggaagacctgatgggatgctagttcagcccttatctgggaggtgggcttgggtgagctctccctcctcctagggtttttcagggtgtgcacccacagagagaaataaagcatggggcacatctgttgtatctaaaaccaacctaatgcaatggcttacatgaaagaaaaggcgagtgggatggggcgtgggatctgttagcaaacaacactaaaatatccgggagtacattctggcatggcagtggtctagggactctgataatgccattggggtttcatttggctctgtgtctcagttctatgctcccctgttggacttcttccctggttggctcttcctccctggtagaagggatgtgcaggttctggtcttacacatggaaagggacactctccttcacttgagcccaaggcttgcctggaccccatgggaaatatataaccatcctccaatcactcactgcatctaggggaacttggcatcccggtatctaggctgggtttaaggcaaggagagaaaccagcccctcccagctgcctggatggagaatgaaggagggatgactccagaagaaaagtcaccgaaagggggagtgggtgtggagcagggggaggtgggaggccttctgctgggcttgaagcagaagctgcttcagagaatgcacaaaggggcagggtggaggctgagggcatttcagacccgctccaccaccttccatttggacattggatagcctttttccaaagtcacttctgatctttctgcaatcacccatcaccgagctgccaagccacaagcttccttatggtagaactgattggctgaatgtgcttatctcagctgaaatgtgtggaagggaaccttactctccaatcaactgtatctctcttggttcggcaaacatgggtactgtgccactacgttctaagcaaggggcagaggagacaaagctctgtggcttttaggagatggagtcacgaagacataaaagagagttttttacttcagagggcctaggactgggagaggggagtggagaacagggatgttcctggagagagggggcatgatttattctggtgaaattgagacacggatgggaagcagacaggtgagatgcaactctagctggaaaaatgaggcattttgtaaaagattgccagctgcagagcctagacttgatcctgtaggcatagggagtccttgaaggttgtagagtgagagaagggcttgatcacaactctgctttaagaatgtgagtttgacagtgacttataggatgaagttttgtgtgcttgtgtgttttgtggagtggggatggagggcacaggagaaagaattgagaagcaaaaaatgctgtttggaagctgtttcaatacccaggagaaataacgtctgttttagagcatttggggcattagaggaggggaaggaaaacaagcatctttaatatgacctcagcattccaaaaatgcgttcatatccatccttatccctaggatacaaacgtgctgggaggtaagcagaatgagtagcagaaattccattttacagatgaaaattgaaatcaaaagggcaagagttacacccatcagcaagggacagaactgaagcaaaaccagggccaccaacctcccaccaccccctgagcctctgtgcaggggcacctgaaccctgatagatcactgctgttcccacctcaggcaggtgacgggagcccacctcgacactcctaacagctaccaaataaagcaatctgtgctgctaatactaatataaggtattgattatcttactgcaggagtcctgagatggtcagctctggctgccgaggctggcggcagcagctactaaattgtgtttatgggaagctttttacctgaaggggtcataattcactctcgatcaataaccgatcaatccacctgctttgcacattgcaaatcctccagatccgtccgcagagagaaagagagaggaagacaatctgtttattggaaaaagatggcagaattacaggctaatgcagccacttaggctggtgattacataagctttaattttttttttaatttaagtgaagtattttgagtgatatgctgagtccactgaatttaaaaaagaaggatcttggttggtctgaaaggatcagataagaaggatctggtattcattgagcacctacgatgtcccttgccctgtacagaactctctcatttatcctaacagccagcaaaggaggtattattcccacttccactgggaaacctgggactcagcgatgggaaatgactagctcaaggttagtgattgagctgaaaatcaaaaacatcgtctcccaacagggaaataagttaagtcaagggcagctgaacttgaagagcctgagtcccatttcggggctgggataaggtggagttatggcaggaactgcagagggatggttgggagagggaggggcctgggaggcttgcctgggcccctactgccagcacacatccccccactatttgctggtggagttgcagtcctcagacgtgcaggatgcattagagagccatccagggccaccagattccctctagctgctgctctgctctccagcccccagtggcctcccagggcccagaggaggaggccattgagaacctcaagctgcttccccactctctaggaaactccctgcacaaacccacctgactcaacccagccagatccctccccagcagcccttccctggtctctaagcctgagccctctgaaaatgctttctccctcctcctgccaatgaccaaggtccccaactccaagcaattttcagagcgacccacttggggagtgtctgcactccaagttcctccttcctctgagctctagtccctgctctcttgggtccctcctggcagggtggagaggaggaggctgggttggggccactcggctccaagggggcctgcatccttgtccctgcggctcctatatgcaggcccaacaagctcctggagtccagcagccatagatctaaaggcacatcagcctctggttcattctctttcaaactagttcagatgtggagttctcccccgatgtggctctgtctcccttcttactgcagtcaccatgggcagaacagaacttgagtcctcagagacaccatgatgaggttgaggaccgaacctacgatcttgtaacacgaggagtttcactcactatgatggggtcttgcatctcagctagtgccccactcggaagaacagcatcctgataggccttaggcggtgcactggcaccagggctcagggacctcaccatggtcagaatcagatgaaggaaaacagttttccgttaacaactcattcttcctgctttttttgctgatttgttgaaaattattttccccctaccgtttcacagctaattcattgtccctattgaggccactaccctgattttggagactgtgactagaggcaaccgttcagccttcctggaaaatgtctctgtttgggtctctctgtaataaggaattgcacgtggcattgatcatcaagaactcccacagcattggctcaattagcaaacagttaaatgtggcagattgcatccagatagcctccctcggagtgacagatgtctgcagtcaacatagggaataactcccagagattggctgaggccaggcccaacccctccctggtggtcagagcaaactccagtggcctcaggccccacacttctgcacagggaggggccagctgttcagtttctcccctggagccccttacctccccagggagagtcttggggatcagcaaacctggactatttgccctgaatagtcccagtccccttggagggaacccttctctgcagaaggcaagggctgagtgtgcccccagatgtcagcccagtggtctttgtctcggctgtgcctaccttcctgtgacagctgtagagacagctgtaaggtgacaccatcaatgcttttctggttaattaactaaatacgcattgcctagggcctcagtgtgagtaagtttcaggatgaaaagtgccaattttcctgcatgtatgtgtccaaactattttccttagcagttcttactccctttttctcatccgttaagtcaagtagatgtgtagctcagctgaaaggctcagaatgacaggcacatggaaccactaatttagataaatgatgctgttcctgcttcctggagacacacctctcagcacattccagggcctgaggaactcagagggggccagcgggagggtgttacggctgtttcttgtgtaggaattaattaagtgtttttatcggctacatattccccctgagcctgttttattctagatgatgttatgatcttaatgcttatgtctctccaaaattcccacattgaagtctactccccagtgtgttggtatgaagagatggggcctttggcaggtgacgagggcatgagggaaaaggaggcccgtctgtccctcccactgcacaaggacatctagatggtaccaatggtagaaatgggtccttgccagacaccagatctgcctgtgccttgatcttggactttccagcctccagagctgtgagaaataggttcctgttctttctgaatcactcagtctaaggtattttgttattgcaacccaaacgcactaagacagatgttgagagggcctgttttacaggaagagtccacgtggcctaacggcttcctccaagagaaatgtggtggtcaactgcttgcccccacctctcctctgggttctgagccttgcctcatgaggctggcctccaaggactccatccccagggcccttgtgctggctggcctcgacttcttcagaggtctaaaggctgaaggccccagtggtggccaaaggcaggaaggctatggtcatgaaagccacctgtgtggatgagaaggcattatgtccaggctcccatggctcagatggggacaccaggtcctgagaaagaaaaggagtcccaacagtggttggaaggaagatggcaatgaggactaagatggccacacctcggaaggaagatcatcctggcctctctctctagtgccccttcagcagctcctccccaaggagtcgtgatgtcctggagagtcagcacattggaaggttttctgttttaatttccctcccactcaaactatgattttccgcatatctggagcaagggaggcccaagcccgggttctcttgggcagcagatgtgggaaatgctgagtacaggagctcagatgtcctcctagggtcaaaaattacatactggggagaacttgcccagcttggaagaagcagaaaatatcagcaagaacagagaggataactttttaagagtaaaaattaagtgtatttatgtcctacacattccccagagcctatttaacattcagatacttagaagatctacctggattttgtgcaactctccttttagctttgctgtttttgttttgttttgagactgactctcgctctgttgcccaggctggagtgcagtggtgagatctcagctcactgcaacctctgcccccaggttcaagtgattctcctgcctcagcctcccaagtagctgggattatgggtgcctgccaccacactcagctaacttgtgtatttttagtagagacggggtttcaccatcttggccaggctggtctccaactcctaacttcaggtgatctgccctcctcggcctcccaaagtgctgggattataggcgtgagccaccatgccccacctagctttgtaattaaatgtaaaaacaaataaacaaacaagcccctccaagctgctgtataaaaagccctcttaaaaaccatcccttgtagggtctctctaaacacagacaccaggacacatgcaggctcccaacctgtaaccagcagagaggctttcagagatgaagatgaatgctgcaaatccagccacaggtcatgcaagggaatctggactgcacagggaaggggtactgtgttcatgttgggggctctcaggatgtggctgctggtcaggagagggctgacaaacagtagtttgtatttcatgcatctgcagaaaacagttaaagagaagggatactgggcctggttcagcaaccggtccaggccggtcagccttgtacaaactccagatccagtgccctggaaagtgactgtgggaggctcagcgtgcttccaagattgggctaagagatgccagcccttcctcagaaggccgagtgggattgcagcaagggttctcttcagccaaggggaaataactcttgcttcaagaatccagacaagcacatcacaaaagcccaactgtgggctcagagaaccaggtctctgcatctaacctgacatgtgaccctaagcaagcaacggtcctgcgtagacccttatttcatccacctgtgagtgcagaggaataacacacaaccctcactgcatcttgaatcccatctgcaccctggaatcccaagccctagcccaccctcccatgagtgtctcaacctggaattcctcattagagcatctggctgccagctctaaaggacatctgtgtagagacctctgagttagggaaccccccgcccgattttcccaatgcttcagcaccatatcttctctaggaaatgcccatctatagaaaatgaacgacaggggcagcccaaacagggtcccttgccagagttcccagcagaaatctggcttccctccctgcccccgcagctcacccgagatgacccaacaacatgctcagccttaccccatgccacctcctgccacctttgcaagccctggaaggaaggcaggattgttcttgatttatgtacaaagaaactgaaagatagagaagttaaatattttgcctcaggttctgcaaagggagagaagaaactgggagtcaaccgaggaccatcaggctccaagctacacacacccagcttccagtcaccaggtgtatatatttttagagacaaagtctcactgtgttgctcaggctggagtgtaggggtgcaatcatagctcactgtaacctccacctcctgggctcaagtgatcctcctgtcttggcctcccaaagcactggaattacagggatgagccattatgcccacactgaccacacaccaggcacgtgaagatggagggatggacgaatgtcagaaggagcccctgtctctagggagctgacagcctagatgagcagacgacatgcaaaaccttttaagaggcagggagagcagctggtgggagtccttgacttcccatatgggcacaaacattccaaagaggtccctgccatggtgaaaaggcatggcgcccaccaccagcaatccagcccctcgccctgcctttcagatgtgcattggtcacagaagctttactcccaaggctttcagaggacagaaggctagactccagcatgagttgggcatcattcccaaaagaaaactgcagtcaacctaaggggcttatttacagacaacactcaaagccatgacactttacttgaggcctgaatttgcttcctcgtgtgaagaaagtgacccctatttcagcccatgcaaactcatttctttctgatgcactttgaagatttggctctatggaaaagtgcttggtgaggggacagaggtgagggtgaacaaggagatctcatctgaacttgttccccaggtccgcatcacagcggcttgattctggctccttgaaatcctgtccacacacaacaagataaatcagagaatggaatgaaatacaacccctggaaattttcaaataatgaaaaccaaaggtcggcagtaagaatcttttctactggggtcaaaactcagttcctcttcccccctcttcctgcccaatttcacataattagtctctactacattgtctttgggggttccaaggaccggacattccatcatagacctcaaatcatgagcattttgcttccacgcaagttacagttttattgccttggctggttgtattgaaaattaagcagtcatttcagggggctttctagaaatcagttacacccatgtctcaatgttgagagagaccaaaagagaagaaacggcacaaatgtctatatgtgatgtcatcagcacccccagtgtgccatccccatcccacacacacatacacacacagctgtagactcacagttctctttttattgtaaagatgatttccctgaagtatttttaagctggaaagattttctacaagctggtgaaaaatcgctcactgcaggagatcctatgcattggcagaaatccagcaaccccatgtattggtaactggcttggtaatgagtctcttccatgtaaattggctcattattatcaatttttgtcagctcttgagtgagtcttgatctgctcccccgtctcggcccaggtgtcagcatgaggcgaacaggagtgtccagatctgctttccatgccaggcacctaagacctcacatctcagggaggacggagagagtgaggatgacagactccatgccattagagctttgaatttaacgtccagaacagagagatgttaaggagacttgcaatgaggtgttataaaaaccaagtttgactgaaagagctggcaggcgatgcagatgaacactttgtcctgtgattcattgctatcaggagaactaaatttgtacagcccagaggagagatgactaatgggaggcataataattgtcgatttatacctgcgaagaattaatcaagaggcccagaggagagagtgttcggcggccactccaggtgcaagtgctgggggtgggcagagccaggaggagccagagaaattaggctaaatagcaggaatgactgtaataacactgaggtccattaggcagagacattgcatggcctccaccatgggatgctacgggattgccatcagacagacctgcacaaggcaacttggggaatagatctctgcaatgatcggtggatttgacaatgcgtctggaagattttagggtgagatttcctcatcccggggccacttctcagggaactgaaaagctgcctttgttttgtagacaaaacttccttcactatttcaattaaatgtgtcttagagcacgaactgcagaaaaatccctgtccagtgcaatgtgggaggcagagggagtttgtcatccttagagtccatgaatacctactaaacacctactgtgtgccaggtggtgcaggggcagcctcctagctgtggggagcttgtgtcccaacccagggaggcaaagacagcaggagaggcaggcaggcccccaggagagtgatgctagctcagccaggctgcagatgatgcccaaagagaaccaggtcaacagccaacacctctatgcaggttttttcacagattgggcccttcacaagtcagtctcttttcctataaaggacaggcaattacccaaatgtgattggagaattttgaaggcttaagagacctctccctccttcccaggcctcctcatgctctcagcttgatcaccccgcactgttggctcataagcaagtaggctgaagcatgcagcaatgttgggaatgttttgttttgttttgtagagatggggtcttgctctgtcacccaggctggagtgcagtggcactactatggctcactgcagcctccggggttcaagaggtcttcccacctcagcctccctagtagctgggactacaggcatgcaccaccatgcccaggtatttatttttattttttgtagagatggcatctcactatgttgcccaggctggccctgtactcctgggctcaagcgctccacctgccttggcttctcgaagcactgggattacaggtgtgagccatggcatccagccttagtaaagttttaaattaggattgccaatgtttaaaaaatgggagctgccatacaaattcgggtttctaacatgtttggcaaactgaactgatgatgccagaactgcgtcctccacgggcagcatcagccatggccgggaacgtgctgcactttaagctctttcatttgctgcagtccccattgctcctgtttgtgttacagctggcctgtctcattctctcattttcctggctcagcttctgtgggaatttcagtttgttgccaccctgagctaaatgaccagaaatgcaaggtggctggcctgtattaactttagagtcttgcagaaaggctcctaatcagttataaaattcagtgcttgaatttgatgaacatcctcagcagtcacttggaaaacatttctgtgttttgcaaaactgcaagcaaatacacaattaccctgtattctttcctctagagcccacgctctgaatccttccttctgctcactggtagcatgaagcttataactttagacaagctcgtttgctcccttttatttgcaaaggaaatgtataacctcactgagctttttttttttttttttttttgccttggctgccaggagcctcgtctagcaatgctgagttgcggttcatggttcagctcaagagtttgttgcattaatccctcaccttccccgaactgatttttctttttttttctttcttttttttttttttttttttgagacacagtctcactgtgtcacccaggctggagttcagtggtgctatctcagctcactgcaacctttgcctcccaggttcaagcaattcttatgcctcagcctcccgagtagctgggattacaggcatccaccaccacacccagctaatttttgtatttttacaagaaacagggtttcaccatgtcagcccagctggtctcgaactcctgacctcaagtgatctgcccgccttcgcctcccaaaatgttgggattacaggcaagagccaccacgccctactccctaattgatttttttacctgtatttctaaccagtgagttttacatgttttctttgtaatattacaagctgcacttgatgctttttgaaagaaacaaaaggaacacctggaacagcaataaactgcaggaatgtcccagaagaaaactgggatggaccctgccctggagctgggaggcaattagagggcgggctgaggcagaatgatgatgcatgcagcaatgttggcggctgctcccagccacagctgacactgtcagtggaggatgcagttctgacatagttagttcagtttgcctgggtgacagagcaagaccccatctctaaaaagcaaaacaaaacaaaaaaccccgacattagtgagctggaaatgtgcagcgaggcagcttggaagcaaagctcgggatcgtgtggagaaacgtgtgtccgatattattcctccgatgcaccagcaccatgattcctaccacaggcctgcatggtgggggtgctggagtatgcagggaggagtcagacaggcctccagcctccaggggtccagtagaagaaaaatagcagcttatagctgctgctggaatgcaccatgcatcccttggcccccagatttcagcccagctgcagcagatgggaccctgtgtttgccagggtcctgcctcaagcatggaccgaggcttcctcaatgccacaaaacactgctcagccacacgcaggctcccccaggatgtttgggggaatccacaccagggcagcctcagtcactgggaaatagagcctcgccctcctgggcctccggtgggaagctccggtggggagcacattcttcacggctccacaggaggtcctagaaggctaaggccagggtgcccacagtggccacctgccgagtagcacacccttcatggctgctctccctctccttctccccgcccccatgtccccattcctgcctcctgggattgcccccgacatagatgacctgcaaccaggttcttactccaggatctgcttgtcgaggtactcaaagacagtgccagaggagtgtaactgaggctggagtatgagctgagtgattagaaacggcttcaaggaccaggagacgtttgaaccagcaaaggctttgctggacaagcagagagggaagtgaggagagacacattccaaggggaggcccagcgcaagcggcagagagaaggcacccagccggtaaaaggattggtaagttgttccctttgtccagatcatgggctgcatgatcaaccctggaaaatgagatgggaaaatagggtgagctgggactcccatgggctcagatgtgccactgtggagtatgagcttcattctgtcagtggtgaggatggtgtgatttggagaagcagttgagcggggaataagggattggatgacagattcggacgaagactgtctggggaaggtgggccgccccggctgccacctctggagtgggcattttcaccatgtgatccaacagtgctgtggtgacctgtgtcctctccatgctaggctccaggctgggtgctcacagagtgcctgtatggctggcaggtatggcgcagctcctgggctcatggacgaagagtcagaattggtggatacaaagttgctacccccaggcaggccagagatgctgatcaaaagtgctcaggtggatgggaggtcatttgaactgaccctggaggggcatatcccactctccccacagccaggtgggctccaggtggctcctgagtggcgtgccatgagcttattatagggttggagtcaccctccttgtctgggggtggctgagaccagcatggacaaccccaaaacacagcttaagagtaaaataactaacagaactttagaattaaattacatttactctcacatttcatttgcccacatgacatcaaatgaccacgctgtctcttttctctccatgtaaagtggccccctgtggggatagcccagatgtgtggctatggtgaggacaagttgtggaaaggcagcctaggctctgagtcccaggtcggcctcctcactgtgcccgaatcccctgtccccctcacccggactgccaggcggcactggtttccacagcatccatgctcccagaagaactggaggttgactttaggaacttcaaactcaagcttcccatattcacacatccccgtttctgagctgctttctcttcaaaaacatatttcttactttgaggtgtgaggtctttgtaaagtgtattctgagaaatatgaattccacaggtcattaataggtgttcctttaaaataatgattcacatttgctataaactgaatgcttccatctcctcaaaattcatatgctgaaatgttaacctcccaggtaatggtattagggggtaggtgttttgtgaggtgattaggttacgagggtggaaccttcataaaaggatcagtgccttaggagaagagacatgaaagagatcacttcctgtctctgccctctgccatgcgaggaaacaggaagatggctgtctgcaaacccggaagcggctcctcactggacaccttgaatcttggacttctttacctccagaaacatgagaaatcactgtttgttgtttaagccaacttgtctatggtatcttgttacagcagctcgaactaagataaaatttagacagctttaagaaatgatgtgtggagcaaaatcaaatgggtttctttactactggacatgtcagagccttccatgtggggcctggcaccaagtgaaaacacaggacctgtgttcagaaagtataaagaattgcaagaccacagaacgtgacactaggcgcagagccctcctgagttggagcccgagagcccacacacatctcacccctgtgcagccagccctgcaggataagccaaagttgccgtgcacacctgcatgtgcagtgcatgctccaagaatagaaaagaggcaccagaccgaggtcacaacgtgttcctaacatattcaaccactgattgacagctctgcagaacacacttagggaaatcctgcttacaactgagttctcattttcctctaatttccaagctccaatactcagacatacagggaaaatgagtagtttccaagaaccccacgggacagttgtacatagaaagggaagacccttttcatctgctagatcttttttgtctcataactgggttagtgttttttatttggggatttttctggaaagtgaggtccactgataatttctgctcattccttattttcttccattcttttaaataaagcccagcatctctgaactacgaaaacaaattccaggcaacagtagcaggcaatttacagtgatagatgaatataacaaaaaatagcacgcttcagctggggatggtgggcagtgtttgttcttagaatgccagctctgttaaagagctgtcgggcctctccaccttactctgcccatgcaagaggccccgtgacacccctaggccactggcttccctgattctcttttctctggttatttatgcctggggagggagtgggggtaggagatgagggacacaagccttagcactgagtcacttaaaagtgggtggagtcaaggctgttccattaactcccactttcctcagtgccctgcttggctggagggaccccacccacactatctccagctgctctgactcagaactgccaggtccgtgccactgtcatttctggcctcccactctgtgctcctccaggcctcagagttagctcgtgctccgctcctttctaccccatcctccttccccactgtctttgttagggtgcccacctcctgaaagaagcctactggtttgttttgttctttgagacagagtcttgctctgtcacccatgttggagtgcagtggcacaatcatagctcactgtagccttcaactcctgggctcacgcgatcctcctacctcagcctcccaaatagctgggactacactactaccaccttcatgcccacctaagtttttattttatgtagaaacagggtctcgctatgttgcctaggcctgtctggaacacctggcctcaagtgatcctcctgcctcagcctcccaacgtgctgggatcacaagcctgagccagcacacctggccaggaagtctactgtttagctgggagcaggccgcatgctggtctgggcaggccagctctttgcatctggagctcacaactctgtttaccacagacacgcactgtgcacctactgaatgtacgtgctgtacacttattgagggcccctgcatgcaagggccctgaggacaatttctcacgaggcttgcagctcctgcccttgaaaagcccaactctggtaggagacaggaggctaaaactaacatgcggagcatcccacaccctactctggcttagcccctcccaggaatgtccgtcatctgctgtttacaacttcaactcctcagggggcccttttaaggcccctcagcatctggcctgatctctacctcgcctgtccctgcccctccttacccctaagcttgcaagttccacccttcatgtgggcactcagcagagcatcccgcctccccagcctctccctgggtgttcttccctctcctcctgcctggaggacaccctctccccttccaaggtgcacttcaagcattcacttctctaggcagcttttcaccgtccccacctccccaccaggtgagggtaacagctcctcccacctcagtgcctctgctggaccgacacaggtctctaacacagacccagccaatgcctccctggcagaagtctgtctctcccgccaggccacgagcaactgaaggcaagaggggtctgttcatgtttctttcccaaagccagggcctggtggtggctactcaatacatcagtgatgctctgcattaatagcacagatccagaggaagaagagaagtgggttaaagggtgcaaacatacggtaagacaaaaggaataagttcagtgtctgatagcagggtggggtgatgatacttaaccaaaatgtattgtactcaggcgatgaatatcctgaataccccaattctatcaccacacactatatacatgtaacccattttctcatgggtttttcataaatctgcactttttaaaaaaggaaataagcagtgtattaatctgttctcatgctgctaataaagacattccagagactgggtaatgtataaagaaagagtttcaacagacttacagttccacatggctggggaggcctcacaatcatggcagaaggtgaatgaggagcaaaggcacatcttacatggtggcaggcaagagagcatgtgcaggggaactcccctttataaaaccatcagatctcatgagacttattcactaccacaagaacagaatgggggaaactgtccccatgattcagttatctccacctggccccgctcttgacatatggggattattacaattcaaggtaagatttgggtggggacacagccaaaccataccaagcaggtatgtgcaaaaaaaaaaaatagcgcagatccaagcacctcggtcacaagccctggtcccaaggggcaggagtgacttttccaagctggaccccaccaaggcaagtggcagctatgaccctctttttcctcactctcatgccctctacactctcaactctgcctctcccttcctagctcagctttcatgatgataatctcagagtccacagcactgtgttagaagacagagaagagaaaaagaagctcacagtcttaagggtgacagccctaaaatattgagttagaaattgcctggggactcgacttcacagtcatggcaaagtagatgcaaatacatattcaaattcaatgcaaattcactggcaaatttcctccctcctccccaggacccagtgaggctggcagggcttggatgggcgatgcttgcatggcagggcctccctcctcctcttagtgccctccatggtacccagagctgagttccaggcagtaagaggctgcaaagaaccagtcccagaggagggcttcttctcagggacatccttctggaggcattgccattgtgaggccttttgggatgggcccatgagggacaagcttcctgcaggaaggagataggccctgtgtgcattctgtatgggaagagaggagccaggagagcaaccggaaggaagccctgtcaccatgcagcctgagtgctcactgcagggaggagaagctgcagggcacatctcaggggacagaagagaggctggtggtgcagaaactcaggagtctgagaaagccagactggttgtaggtggtggagaggaaggaagggaggcagagcaagttcaggtttacttagggctcctcctgagctctctggggacgtccaagaggcctggagctcactgaggctgggagaggctaaccttagccttgggtcacgcacaggcatagatgacattactccaggtggtccttcctgtcctggaggccacatgtcccagagccacagacttcttgtttgggaagaggtggacatgaaatttctgctttggcagagagcccaagatgaggagatgccatcattccgacagcctggcaggcaccttgtcctttcctgctgacttggcatggcagggttgctcctccagccacagcagagcctggccaccagcaacagggctccctagggaggcacatgcttgactcacttctgtgacctctgcaccagtggattgcatggggacaggcttgcttcagcacctgggagagctccctgcgtaggttagtggcagtgagggtgagagcatgctaaatccaagatggccctggggaaacagagccaagctggaccacagagggaactccctgattaagagtgcagcctccacccagcgttcttaacagtgtaagatacacgtaatcatgacttactgagcaccggctacatgctgggcattgtgcacacatcatctctaaccattgctacagccctcaacttgttcccatttcaaaagcaaagaaaccaaagctcagagtggttaagtgacctgcctaaggtcacacagcaaacattccacagaactacccaaaggtggttgttgggaaatatgggggtcctccttgtccttcctctcacaatggtttatagatctgccctgagtgtggttttggtgccttctttggaaatccatgggaaagaaaagtttctccatggggacaaaaagtttcccacagctgggcatgatgaccatgactttagaagattactgcagggactcattaaaggacaatattcttgtcaggatgcaattaaagtccttcccccttccatgtttatggaaagaaggaatgggcagaatggcatctggtgaattcggagccttgtcggaatgcatcactaagctcacggtggcacctcggccctctgctggcctcacaccccctccaggtgcctgcccatcatacagtccagcctgtctttgaggctaagagaagatgattgtcatctccagctgccccacaaatccagctcttctggaaacaggttttctgatgaagaatgcccctcccaattcccagcccacacggctcaagaagtctgacttcactgtggactccacagcaggcacctggccaggcatgacatcccctgctgaaggtcactggcttggcatggacaggcagcccaagcaggcagtcagagccactgggcttcagctcttagaccaccgttaggagcgggagccagttttccctgaggctcctggctgaggaccactgagggatgcctgaggagcagacagcatgaaggagggcagaaccgtcgtgggatcctggtgacactgttcgcatctgcatctggccatcccaagccacaaatcctggactttcccattgatgtaaaccaataaaatctccttgcctgagctacaggaggttctgtttctttcaaatgcagacaaaatattttgacaaattacctctccaggcaattgcttctggtgttttttttttccactctaaattcaactttctaggctacctaagtcctgctgccccatagcagatctcctaacgtctccattatctgacctgttaccaggacatctgggtctccttctgtaggacttgttccccagcctgagacttgatgcctgtctccccatgttaagcccagtgcccgtcatagcaggtgcacaaaagtggtttaaacttgtgcctcctaaacctgcaccccccacctcaacatctaaagcagcatatgaaggtcaataattgtgtactcatctttggaggaatgagaccccctccagccccagctggtctcaccttcacacctccacatgacctcagaaaaagatgctggcatctaagcatgttacacagggcacctggcttgacctctctttgtcaacagaatcagggtgcatctcagaagacctgtagaggaagactcccttcaaaagcccagagcatatgggctgaaggtcacttatcttccatctgtgatgccccacatttcccctggggctttgccatccattggcattgtcattctctctaattaggtaagtcgagagagttggggaagggggagaggaggaaagagaggagagagaactggagaatgcgcattcctaaagatccatgcacaacacatttggagttgccaattcatggcacattttgtaaatttccattacaaaggacagaattgtatcccattccaatagaatgcaaatgaattcctttgtgtgtatattcaatttaaagaaaaatatataaataactgtacaggtggtggaatgattatgatgaatagaggagcctggatcctgagatccacaaacaaccatcattatcttcttgagtgacctgaggtgagtaacttaacctctgtgaacctcggtttatttgtctgtaaagcaagaatgatgcacctgccccacccttctgaactaacagaatgaccgaggctctgagcagccaggggtgctgtgagatgatttatgagccttgaccttgggctgctactggaaaatcaaggctccaccactgcagtggggctcttactaacaaggcttggtagcctattttggagtctgtcccaaaagactgaaataaattaacttcatgagggattttttcccccaaaatagctataatctataccatcagtcatgacagagcacaaaaattcaactgcctacagggctcagtggtcccataagttatggaaaaaggcaaggtataaagcaatagggaagggtgaagactgtggcaaactgttgaatccatgcccttgccccatcttaggggccaccaagctctactagcaggctgtcgcatggggctaagactcaagattgacagaaattcccatttttttagtagaaaccagaagggttgatttttacatgaaatctcctctggttaatttttttttaatttgacgactcaatgttaaaacttttgtaacactttgtgagagccaaaacaatgtatctaggagctagatttcacccacagcccaccaaactctgtttagcaatattgcaatcttcctgttttgattccatttttcaagtgtgtaggttatgttgactttatgtcaaaaataaaagcaagtaacccagcaaatgccctcaatttgaacaggggtttcttctgtcaccctgcacctgcacacaatgaatccacatggggaaggcagtggcgttcactctcttctagcccagtcatcatggcaggctgtgctgttcctgcacctcactctctccacccaactctgctggaccacttgggcctcccagcagagatccctgaagatgagaaggagccctggaatatagtttatatgttgtcccaaggtaaaactggatgtttctgtccatttttgtttcctgaattttacaagctctgcaaattaagtgcatacacacaccgttgctgactgccttgttccgtgacaaggaagtcagactgctggaccccaatgtgcccatgggaagaaaatgtcttaattgcagcccaaacacacacgcatacattcactcaaccaaggcattctgccagcatgctgtcaccacctttgacgtcccttcttgtgggtttgtccctttaatttcttttttttttttttttttttttttttttgagatggagtctccctctgtcgcccaggctgtagtgcagtggcatgaactcggctcactgcaagctccgcctcccgggttcatgccattctcctttcttagcctcccgtgtagctgggactacaggcgcccgccaccaagcctggcaaatttttggtatttttagtagagacggggtttcaccatgttagccaggatggtctcaatctcctgacctcgtgatccgcctgcctctgcctcccaaagtgctgggattacaggcatgagccactgtgcccggctgtccctttcatttcaaaggggtgggtcccttctctctttttcctggactctttattgtactctggccacaaacactatttgctcagcatctctggagggcaggaaagcctctttagaagttaattgggtgaacattcagattgaggggcatgctaataatcagagcatagtaaggggattatgtgttagatttctagataacagtgttttacccccctttttatgtgtcagcaacaataaatcgtctttggaaacaaaataaaaaccaaacccttgacaaacatgcaaacacctggatgcagaactactaaagctgatgactcttcgtgaagtccatagcactaggtagccagtttcctgagggcagcatcgcacacctgccttgacagggccagtgtgctcactgcccagcacagtccagaccctgcccaccaaggacagggactcagcgccagagaaacaaatgattcgatggagttgtaggaggatttccaagaccaccatgcccagcttacctgtatccctacagattaatgaccattttagggaagtgtttgaatgaaggaagaaggaatataattaaataaacgtctgtgaaattagatttttatttaataaaataaggcatcagagatatatgagatgtctcatatatctataaaatatatatgtaagctttatataacatattatgtatttacacaaaaagtaaaataaaacatacacacacacacacacacacacacacacatatatataggcaagatttttttcatctgtcagataggccacaattaaggggtctgccgagaccctgtgttggagagggtgggggacccaggcgtggtctctgcagaggacagcagtcaccaggattgctcactcatccttgggacacgtggcaggatggcacagatccattccatgtgattcctttcaccaatcaaatacaaaggtgtcacttccaagcaaaaagtgggagacacagtccatgattcagtacattcccttttagggtccctgtgctgtgaatctcataattgctccagattgtggctgtgctgtcctcctgggtctcagaggggggacgatgcagaattgagtccctccccaggatccaagacagatacgaatgttagaaagaaataaccctttgttattttgaaccaggacgatgtggtgctgcttatgacccactgcgtcaacaagcttattctgactggcaggaagagctatttggcaacatctacaggaatttagaatgttaatacctaagactatgtaattgcatttttatgatttttacacaatttctttttttttaattttactttaagttctgggatacatgtgcagaacgtgcaggtttgttatatgggtatacatgtgccattgtggtttgctgcacctatcaacccatcatctaggttttaagccccgcatgcattaggtatttgtcctaatgctctccctccccttgcccccgaactcccaacagaccccggtgtgtgatgttcctctccctgtgtccatgtgttattgttcaaccccgacttatgagtgagaacacgtggtgtctggttttctgctcctgtgttagcttactgagaatgatgacttccagattcatccatgtccctacagaggacatgaattcattcttttttattgctgcatagtattccatgatgcgtatgtgccatttacaccatggtgtatgtgtgccatttacacattttctttatccagtccatcactggtgggcatttgggttggttccaagttgcaatttattttacacaactttacttttacacacgtgcaaagtagtacatgagtgagcacgttcatgttgtgtagcaaacactggaaagaaccaagaatatatcaaccagattctctgtctgttttatgctttaatgattaataaatcataaaccatccagactgaggaagagtagacagcccataaagagaatagagcacattcctgtaaactgagaggaaatgtttctcaaaacattgcaaagtagaaaagcaagatgcaaaataagaatgtaccataatttatgtgtgtcatcttcaatttcttttattaatgctttatagtttccagcatacagatttttcaactcctcaaattcactcctaagtgttttttatgctattgtaactggatttttaaaatttctttttttgaatagttcattgttagtgtgcagaaacactactttttaaatattaattttgtggtgagagtgatcttctttgtcttgtctctggtcttagagaaaaagctttcagcttttcaccattgaatatgatgttagctgtgggcttgtcacatatggcctttattgtgttgacatacaatccttctaaacctattagagagtttttatcatgaaagaaccttgaattttgtcaaatgctttctctgcatccgttaagatggtcatgtgttttgtgcccttcattctgttaatatagtgtattacacttattgatttgtatgtgttgagacttccttgcacccaggggtaaatcccacttgatcttttgcaacataggtgaacctggaagacactatgccaagtgaaataagtcaggcacagaaagacaaatactgcatgacctgacttatatgtggaatctaaaaaacttgaactcatagaagtacagagtaaaaatggtggctaccagagactggggtgggagaaatagaaaaagggaagatgttggtcataggatacaaggtctcagagagacaggaggaaagagttttagtgatctatagcacagcaagtgatgatagttaataataatgtactgcatatttcaaaattgctaaaagagtagaatttaaatgttcacaccacagaaaataagtatgcgaggtgatgaatgtgttaagtgacttgatttaatcattcaataatgcatacatatatcaaaacatcaggttgtactccataaatatattcaattattatttgccaattaaaaataaaataatttttaagagggaaatatttggaaaaaagaaattgccctgaagtacttcttgctcattgactgttttcaagtcacaacggaagttaagccacttcatgcactcatgaatctgtttgtccattcgtccatccatccatttgtctgtccatctgtctgtccgttcatccatctatttttctgtccatctgtctctccgttcatccatccacttgtctgtccatctgtccatccatccattcatccaaccatccatccgtctctccatctgtctgtccatttgtctgtccatctgtctgtccattcatttgtccacccatctgtccattcatccatccatccatccatcctcctttcttcccttcctccattcaaccatgtctccatctctctattcatccattaaacataatgagataagtgttggataggttaccaaaaaagtgaaccccattctgtgttggttgtcttcgaaggttggctgagggatgtcacccagaaaccaagagatacttggagtaggaggtaaaagtgtatgtgtttgagagtcagccagagctgtgatacagctgtgctgctttcacaaagaagcttgagaccttggacaagtttcttaacctctctgagcctccaattcctcatctgtaaaatgtgcttaactaatcagtgtagtacaaagactcacatagcccacaactgaagtgaggttgctttttgacgaagtaaagcctttgctcccgtctttcccaggcatttcaaggcctggcttccacccaaggggcagtccctacaggagactggaggaagaagggaaaggcctcggctctctccctattggccaccatggcctggctgctgcccagacggtctcagctcctgctggttgcactctccacaccatcgtccctgcctctactccagatatggtgccaggaatcatggagtgtttgctcttcctggaagcagactcctgtcctattccttgtgagtcctctacaccaggctaacagtctctagcagaatctctcgaggctaccctgatttgagtgttccaggtatgttcagctgaaccctgattgagagaactcatatgtcagtcccagtgctgtgacttggagttacagagttgagaaacaaacagactgccacttcaccctgttcaaggttctctagctcacaggagaaacataaatacaaaagaaaactgcacccaaaactcccaggtgccacgacagaaatatggattcagatctgtggcaccatagaatgaacaggtaccttgcaggcatgaatgtgggtgagagtcatcagggaaggcttccgagagaaggtgacactctatgtgagtcttggagggtgaatacaaactcccttgtaggacaaggtgagaacattcatctcccggaaaatacaccattcaaacacatgaaagtacatgagtttgctacaggaatggtagtttgctcagatgcttgggacccatattggagataagagcagcaggggagaggactgaagtgatttaatgactggtatcaaattgctcacttttaaattttgtcaatcaaaggcatgtcttttaagtggccatctgttatcactcaccaccaggatataatcatataatcttggaataaagaaaagtcctttgtagcaaataaatttaggagggtgtgtgtgtccgtgtgcatacgctacctgcgtgtgtgtgtgtatatacacacatatatatacacacacgcatgtatgtgtatatatatgcatatatgtgtatacacacacacacacacacacacacacacacacacacactacctgtccttgtttttcttttctcattttgcagcagtctaggaacaagtccattggctgacatttgaaaaccactgatctcacctgatcctcttattctacccacagggaagcatgtcattttttaaaaattcattttttaaaatgagttcaattctcttaagtgtttattgctagccctttgactgctcctcacaaacagacccctgaccagccttaggcacttccaggtacttgggttcagacaacacttggtcctaacaccacagggaaaagcattaaagttctcggattactttttctgcaggtcatttgataatactttccactcctagtgaatgctacaacaagcaatatatattggtaattgcagccatctaagaatagacatatttgcaggaataatgacctcctcctccccctaaaaaaaagttagatttaagtaatactgccagttggtggccatttgtgcactcatgtctggttgcatttgcctccagggacagataaatagtaaaggagaaaactgaagtggggagggtctgagtaaatcagtctctctgcctctggctctctctctctctctctttcacacacatacacacacacacacacacacacatctgttattttaaatgtgttatgagtactttcttggtctgggaacccacggactggttcctaggatgctgcaaaatgagaaaaacatggacaggtagtgcatagataggtagattaaaaaggtggggggctgttcagggaccaaggttaagtgtgaacaaagcaacttccgtggagttctattatccatggcagggaggtgctagtgtcatcacagaaggtgaaaattcctgtctgaatgacctttggaagcttccagcagatgttggaaaagattttgcttcttcactaaattgccagaatgttagtttgtatttagaagtcactttgtacagaaaatacaaagattcaaatataagagtcaccctcacctaagccaagggctcacactctgagagggctgtgctgattgagactgaaagagggaaagggagggttgcccttcatcctgcactagttttggggtgcctgggctgagtggagtcatgggtgaaattgctctttctttaagctgctttcattccacctctctccccctgtttcttctcccatgcccccatgccaaagaagagggagttaccttctatcctgacagcatctccttcagagagggttgccttgatgagaaaggcaaagtaatctgatagagccagaaatacccaaggacaagacctcaaccaagagaaggaagaggaggaagaaggggaagtggaggaggaggaggaggaggaggaaggagaaggggaagaagggggaaagaaggagaaataggaggaggagtaggaagaagggggagtgaaggaggaagagctactgcctagtcagtagaagcctggctgttggggccgcagggcaatagtgactgcctcctcacccacccagcccaattatagctgcagtgcctgacagggaaagtctaacccatgctgtccttgagaactgaaccctgaaacatggctgcatgtttgaaacttatcacaagtcttgggatgcttgcagcttcgagccacattatttttaataaattcatttttgaagatttccctgccatggcaaggagggcacatctttgaaagccagaggatctaaattcaagcctaaattgtattctggtctgccataaggccttgtccaagcctgtgccttgcccaggccacggtttcatgctgctgtattgccttaatcagggagctttctcttgccctatgcagctccaaccactgtgaattcttctggaaggttcttgttggttagtgttagtgtaatgccaggccctgaccgtcacccagggtatggccagaacattgagaatgtttgcaatgtgcatgtatagaggcagaaggacaaacattacaaccttttggggaaaactttgagatgccagagatcaacaaagggccagagactggatcatgatatagttcttcagaattaaggctcagctgggcatggtggctcatgcctataatcccagtactctgggaggccaaggagggcagatcacacgaagccaggagttcaagatcagcctgggcaacatagtaagattccatctctactaaaaacagaaaaattagctgggtgtggtggtgtgtgcccatagtcccagctatttgggaggctggggcatgagaatcacttgaacctgggagatggagtttgcagtgagctgagatcatgccactggactccagtctggatgacagagcaagacaaagaaaaagaagaagaagaagaagaggaagaagagaagaagaaggaggaggaggaggaggagaaaaataaagcttaggctggggaagtgccttagctgtctacactagaaattagactatccggaaaactgaacatttattcttcccttctgtagatgctacatggatgaagcccatgacttgaagaatgagcctaggactatagtcttgcaccctccaggaagccttcattcctgctttcagtctgccccaggattcctgcataggtttctaagccatttatatccaagtttgcattggccaaatctcatgactgagtctcacctctcagtgtgtcagagtcaccagcctctttacttgagcttctgacatcccagacaggcccttttcttgcagtcttggcacatgtccaaaccactcccccagaggtgtctgcttggtttatacttcaccaccttcaggcctttcttaaatttttcttctccataaaagatttgaaatcattctgacactctctatccctatctattttcctcacagtttcccttcattttctccttaaaatctaacactagagtgatgtcagcaacaatggtagagtaagaacctctgaaaattctctccttcataaaaggaataagaaagcttacaaaaattgtcagtgtccatttttttcagaactcttagaattaaccaagggcttgcaacaacctagggagcatttattcaataaaaatggctgtatgtcagtaaaaacagtgagctttatggcatgttaacttgccttattcccatgccctgctttccaacccagtgataaccttgaaaaatcacagcccacactcccagtgcagtctggcagtcacaggaagaagaaaaagagatctggagctctttcaaggtctggttccgaaaatttaccaatatctgacctgtctgaaagttgacctgaagaccacatttgcaaagctgtttgtacttaacctgacttgaagcttgatcagactaaaaagtttcctcttcaggggatgtttgttgaaaacaatttagaggcaaatgtcttaactttacagctagctgaagtgcttgcttcaaaggtggataagaactggtaaacaatagactaaacaaaagttttataaggacaaactgaggaataaggtgttcataggggctttgaaaacctctgacatattcctggcaaactagaagaccacacaaatgcccagggctgtgcacatgcttaggaaggagttgaaaagaccctaataacttacctttagtgattaagaggtgctgaacaagcaggaagtgaaggaaggaaggcagagttgctaaatgcctaactatatgtttaagacatacatcaacacacagagctccttgcaacagactggaaggcttactagttccagatatttaagttaatctctgtccagtaattagctaaccactacttcagtggtcacacacaacagagaacgcagactttacagaatttgttcagaaagtcactaaacaaataacaaattcaacaagcagcaaccacaacaaatcctgaagaagggggaaatctgattgacagagttgtcatgttattttatccagttttcaacaacaacaacaaaattacaagacatgtgaagaaataagaatttcggtccatatacaggaaaaaaaaaacaatcaacagaaactgtcccaggacatcagacttaagataaacacttaagacaaagacaaagtcacctattttaagtatttaaattttttaaaaagccaagaaaatcatgtctaaacaattaaaagaaagtctgagaataatgtctcaccaaatagagaatatcaatttatagaaagtatttaaaaatgaaccgaatgtaaaatttaaaagaactataactggagcttaaaagtataactaaataaaaaataacacagcagatttgagcaggctgaaagaatagtcagcaaacttgaagatagatcaattgagatcacctagtctgaggaatagaaagcaaaaacaattaggaatgaacacatccttagaggcctgtgtggcatcctcaagagtatcaacatatgcataatgagaatcccagaaggagagaagaaagaaaaagggaaaaaataaatatttaaagaaataagaacaaaaacttcctaaatttgatggaacttttaatgtacacatccaagaaactgaacaaactccaaacagaataaattcaaatggactcacacctaagcacagcctcatgaacttgtcaaaagacaaagaaaaaaatattgaaagtgagagaaaagttactttgaacaaagaacaaagaattctcaataaaatttacagctaatttctcatcagaaaccaaggaggccagaaggcagccagatggcacattaaaagtgctggaaggaaaaaaaaactgtcaagcaagcattctatatccagtaacatcatccctcaaaaatgacggagaaatttagacatacccagaataattgtatgttgataaattagaaaacctggatgaaatgaacaaatgtttagcaatacacaaactaccaaaactgacttgaaaagaaataaaaaatctgagagacctctaacaagtcaacagatttaattaataggcaaaacccttccgacagagaaaattctaggaccagatggctttactggtgaattctgccaaatatttaaagaagaactaacaccaatcacttataaactatccaaaaatagaagagtaggaaacactttctaactttttctgagtctagtatcactctgataccaacacagacaaagacatcataagaaaagtatagaccaatatcctttatgagaagatatgcaaaatcctcaacaaaataccagcaaataaaaatctaaaagcatataaaaatagtcatacagaaggactctgataagatagaagagtaggaatcaccagaaatatctctccacctagacaacaattgcactggcagaaaccatctgatataatgattttggacctctggagtctattgcaggctttcaatttccaggggaagctaaatgaactccaaataatattaactcaaagaaattcatacatatacctattataatcaaactgttgaaagctaaccacatcagaaactttggagaccagaagacaatgagctgatatattcaaagcaataaaagggaagactctcaaccaagaatcctataaccagcaaaatggtccttcaaaagtgaaagagaaattaagacattcccagatgaccaaagctgatggaatttgttaccacttggcctgcccttcaagagatgcttgaaaggaatcctacaggttgaaataaaaggacagtaggcagtaagttaaagctatattaaaaaaaataaaggtctcagtaaaagtaaatgtatgggcattttaaaaactagcatcattgtaatatacagtacattactgctaaaatagatttttaacatttccaccacaaaaaatgacaaattgatgaagtgatgagtatgttaattagctcgattgagtctataatgtacacatggataaaaacatcgcattctatttcataaatatacactattatttgtccttttaaaatgaataaataaataaactagtattgtacaatggtgtataacttcgatttttgttttctatgtgatttaagagaataatgcatttttaaaagaacaattgttagctcaaaagccaatattattgtaacttcggtttgtaatttcacatttttttctacataatttaagggtctagtgcatagaaaaataagcttatgttttaggatgcacaatgtgcaaagatgtatttttgtgacattaatgactgaaaggggtggagatggagctgttaatagagcagtttttatatgtcattgaagttaagctagtttaaattcatattagagtgttatcacttagaatgttaaatataatcaccatggtaaccataaaaagtagtcaaagaacatatacaaaaggaaatgtgaaagaaatttaaacactttactacaaaagctcactaaacccaaaggagaacagtaatgtaggaagtgagagacaaaaactataaggtacatagaaaacaaatagcaaaatgacaaaagtaaggccctccttacaagcaattacttaaatgaaaatgcattaagctctccaatcaaaagatatgaatgcacaaaggacaaaaataaaaatgatccaagcatatgctgtctacaagagtctaactttagatacaaaggcacaaattgattgaaaatgagacatcagaagaaaaggatggaaaaggatatttcatgcaaacagtaaccaaaagagagcaggaatggctatactaataaaaagcagaataaacttttaagcaaaaagtttacaagagactaggaaaatattatatactaataaaagattaaatataccaagaagatataataattataaatatttgcacacctaataacagaccataaaaatatgtaaagtaaaatttgacagaattgaatggggaataaaatgttctacagtaatatttggagacttttatacctcattcttaataatggatagaacaaactgatagaagataaataatagaagacttaacacaataagccaactagatctatatagagtactttacccaacagcagcagaacacataatctttacaagagcatatggaacaatttcaaggatagaccatatgttagggcatgaattaagtctcaatatatttttaaagacagaaatcatataactatcttctcaaaccacaacagaataaatgtagaaatcagtaacagaaaaaaaactgaaaaattcacaaatttgtggaaatttaaaaactactcttaaacaactaatggatcaaagaagaaatcaaaagagaaattagaaaatacttagagatgaatgataatgaaaaaagaacatactaaaacttatggggcataataaaacagtattaaagggaaaatttatcattataaatgtttacattaaaaaacaagaaagatctaaaattaataacctaattttacaacctaaggaacacaagaaaatgaacaaactaaacccaaagctagcagagagaaggaaataataaagattagagcagagataaaggaaatagtgaatagaaaaacaatgaagaaaatcaacaaaaccagaagtttgttattttaaaagatcaacaaaactgacaaaattttagctagatgtactaagtaaaaaagtgagaagactcaaattactgaaattataaatgaaagtagggacattacccataatactgtacaaataaaaaggattagaagagaatattattaacaattgtaccaaataaacttgataacctagataaaatggacactttcccagaaacacaaaagttatgaagaaatagaaaatctaaatagacctgtaactaatcaggcgattggatcagtaataaaaaatctcccaacaaagaaaagtcctggacttaatgacttcacctatgagtcctatcaaacatttaaagaactaacacaatccatcttaaactctttcaaaaaattgaagatgaaaaacacttcctaactcattgtatgaggacagcattacttttatacaaaatccaaacaaagacactggaagaaataaaaactgcagaccaatatcccttatgaacattcatgcaaaaatcctcaacaaaatgctaacaaactgagttcagcagcatattaaaagggttatacatcattatcaagtggaattttttcctggaatgcaaggatggtttaacatacaaaaatctatcaatgtaatacagcacataaagagaatgaaagaaaaaacctgcaagtctatctaaaccgatgcagaaaaaaacctttgacaaaatttaacgctctttcatgataaaaatactcaacaaatcaggaatagaaagaacttacctcaacataataaaatgcttatatgaaaaatacacaacaaacattgtgctcatggtacaagactgaaagtgcttcctttaaagtcaggaacaaggcaaagatacctattttcagcacttctcttcaccatagtattacaagtcttagtcataaaaattaggctgcaaaaaaaaagacattcaatttggaaaagaagtaaaaacatctctatttggagctgatataatctaatatgtagaaaactctaaaaattacacacacatacacacacactcacatacaaaaaatctgtaagaactaataaatgaatttagcaaagtaacaggatacaaagtgaacatacaaaagttagctgcatttctatacacaaacaatgaacaatccaaaagagaaattaagaaaataattccatttacagtagccctacctaatactcaatataaaaattaactaataatgaatttatgactgaaatgtaacatttaaaactataaaactcttaggaaaaaaacacagggcaaaagccccttgacatcaaatttggcaatgatttcttagatatgaaaacaaagacacaacaaaagaaaaatagataaattggattccataaattttttaaattatgcatcaaaagatgctattaacaaagtagaaaggcaattcacaagatagaagaaaatatttgcaaatcacatatctgataagggattaatagccacagtatatagagaacttctaaaacacaacagcaaaaaaaaaaacctgattcaaacatctgcaaaggacttaaatagatattttatcaaagaagatatataaatggcaaataatcacatgagaaagggctcaccatactaatcattagtgaaatgtaaatcaaaattacaatgagataccacctcatatccattaggatggctactataaaaaaaagcattaatgaggatgtggaaaattgagacatttgtgcactgttagagggaatgtaaaatggcacagttactcttgaaaagagtatagcagttcctcaaggaattaaaactagaattaccatatgacccaacaattctatttctggggatatactcaaaataattgaaagcagtatctctaagacatatttatacacccatgcctatagcagcattattcataaaagctaaaacatgggaacaactcaaatgtccatcaacagatgaataaaaaaatgtggtatacacatacagtagaatattattcagccttaaaaagaaaggaaattctgacacataccacatggatgaaccttgaggaaattatcataaatgaaataagccaggtacaaaaagacaaatgctatattattctacttataggaagtattcaaatttatggagatggaaatagaatagtggtttccaggggaaggtgtaaaggggatggagagttattatttaatgtgtatagagttccagtttcacaagttgaggagagtcctggagatgaatggtggtgatcattctacaacaatatgaatatagttaataccactgaactgtacacttaaaaatggttaagacagttaattttatcttacaagtattttactgacaagatttttaaaaggatcccacaccattaataagtaggatttatctcaggaatataaggttagttcaatatagaaaaaccagtcaaagcaaaacaacatattaatagaataaagggaaaaattgcatgtttatctcaacatacacagaaaaagcatttgacaaaatccaaaactctttaataataaaaacactcaacaaaataaaacaaagggaacttcctcaacctaatgaagggcatctataaaaggttatttaaggttgtagggggtggttccaagatggccatataggaacagctccagtctacagctcccagtgtgagcaacgcagaagatgaatgatttctgcatttccaactgaggtactgggttcatctcactggggactgccagacagtgggtgcagaacagtgggtgcagtgcactgagcatgagccaaagcagggcgaggtatcacctcacccaggaagtgcaaggggtcagggaattccctttcctagccaaggaaaggggtgacagactgcacctggaaaatcgggtcactcccaccctaatactgtgcttttccaatggtcttaggaaacggcacaccaggagattagatcccgtgcctggctcggaaggtcctacacccacggagccttgctcattgctagcacagcagtctgggatcaaactgcaaggtggcagtgaggctaggggaggggcacccaccattgctgaggcttgagtaggtaaacaaagcggccaggaagctcaaactgggtggagcccaccacaactcaaggaggcctgcctgcctctgtagactccacctctgggggcagggcatagccaaaaaaaaggcaggagaaacctctgcagccttaaatgtccctgtctgacagctttgaagacagtagtggttctcccagcatgcagcttgagatctgagaacggacagactgcctcctcaagtggttccctaacccctgagtagcctaactgggaggcacaccagagtaggggcagagtgacacctcacatggccgggtactcctctgagacaaaacttccagaggaacgatcaggcagcaacatttgctgttcagcaatattcactgttctgcagcctccactgctgatatccaggaaaacagggtctggagtggacctccagcaaactccaacagacctgcagctgagggtcctgactgttagaaggaaaactaacaaacagaaaggacatccacaccaaaaccccatctgtacgtcaccatcatcaaagaccaaaggtagataaaaacgcaaagatggggaaaaaaacagagcagaaaaactggaaattctaaaaatcagagcacctcccctcctccaaaggaaagcagctcctcactagcaatggaacaaagctggacggagaatgactttgatgagttgagagaagaaggcttcagatgatcaaacttctccaaactaaaagaggaagtttgaatccatggcaaagaagttaaaaaccttgaaaaaagattagacgaatggctaactagaataaccaatgcagagaagtccttaaaggacctgatggagctgaaaaccatggcacaagagctacatgacgaatgcacaagcttcagtagctgattcaatcaactagaagaaaggttatcagtgatggaagatcaagtgaatgaaatgaagtgagaagagaagtttagagaaaagagaatttaaaaaatgaacaaagcctccacgaaatatgggactatgtgaaaagaacaaatctacgtctgattggtgtacctgaaagtgacggggagaatggaaccaagttggaaaacactcttcaggatattatccaggagaacttccttaatctagcaacacaggccaacattcaaattcaggaaatacagagaacaccacaaagatactcctcgagaagagcaacaccaagacacataattgtcagattcactaaagttgaaatgaaggaaaaaaatgttaagggcagccagagagaaaggtcaggttacccacaaagggaagcccaccagactaacagcagatctcttggcagaaactctacaagccagaagagagtggggaccaatatgcaacattcttaaagaaaagaattttcaacccagaatttcatatccagccaaactaagcttcataagtgaaggagaaatgaaatcctttacagacaagcaaatgctgagagattttgtcaccaccaggtctgccctacaagagctcctgaaggaagcactaagcatggaaaggaacaaccggtaccagccactgcaaaaacataccaaattgtaaagaccatcaatgctaggaagaaactgcatcaactaatgagcaaaataaccagctaacatcataatgacaggatcaaattcacacataacaatattaaccctaaaggtaaatggactaaatgctccaattaaaagacacagactggcaaattggataaagagtcaagacccatcagtgtgctgtattcaggaaacccatcccacgttcagagacacacataggctcaaaataaagggatggaggaagatctaccaagcaaatggaaaacaaaaaaaggcaggggttgcaatccaagtatctgataaaacagactttcaaccaacaaagacaaaagagacaaagggatcaattcaacaagaagagctaactatcctaaatatatatgcacccaatacaggagcacctagattcataaagcaagtccttagagatctatgaagagtcttagactcccacacaataatgatgggagactttaacaccccactgtcaacattagacagatcaacgagacagaaagttaacaaggatatccaggaattgaactcagctctgcaccaagcagacctaatagacatctacagaactctccatcccaaatcaacagaatatacatttttcttagcactacaccatacttattccaaaattgagcacatagttggaagtaaagcactcctcagcaaatgtaaaagaagagaaattataacaaactgtctctcagaccacagtgcaaccaaactagaactcaggattaagaaactcactcaaaaccactcaactacatggaaactgaacagcctgctcctgaatgactactgggtacataatgaaatgaaggcagaaataaagatgttctttgaaaccaacgagaacaaagacacaacataccagaatctctgggacacatttaaagctgtgtgtagagggaaatttatagcactaaatgcccacaagagaaagcaggaaagatctaaaattgacaccctaatatcacaattaaaagaactagagaagcaagagcaatcacattcaaaagctagcagaaggcaagaaataactaagatcagagcagaagtgaaggagatagagacacaaaaaaaaccttcaaaaaaatcaatgaatccaggaggtggttttttgaaaagatcaacaaaattgatagaccactagcaagactaataagaaaagagagaagaatcaaatggacacaacaaaaaatgataaaggggatatcaccaccaatcccacagaaatacaaactaccatcagagaatactataaacatctctaaacaaataaacttgaaaatctagaagaaatggataaattcctcgacacatacacctttccaagactaaaccaggaagaagttgaatatctgaatagaccaataacaggctctgaaattgaggcaacaattaatagcttaccaaccaaaaaaagtccaggaccagatggattcacagctgaattctaccagaggcacaaggaggagctggtaccattccttctgaaactattccaatcaatagaaaaagagggaatcctccctaactcattttatgaggccagcatcatcctgataccaaagcctggcagagacacaataaaaaaggaaaattttagaccaatatccctgatgaacattgaagcaaaaattctcaataaaatactggcaaaccgaatccagcagcacatcaaaaagcttatccaccatgatcaagtgggcttcatccctgggatgcaaggctggttcaacatatgcaaatcaataaacgtaatccagcatataaacagaaccaatgacaaaaaccacatgattatctcaatagatgcagaaaaggcctctgacaaaattcaacaactcttcatgctaaaaactctcaataaattaggtattgatggtacgtatttcaaaataataagagctatctatgacaaacccacagccaatatcatactgaatgggcaaaaactggaagcattccctttgaaaactggcacaagacagggatgccccctctcaccactcctattcaacatagtgttggaagttctggccagagcaatcaggcaggagaaggaaataaaggatattcaattaggaaaagaggaagtcaaattgtccctgtttgcagacgacatgattgtatatctagaaaaccccattgtctctgcccaaaatctcctgaagctgataagcaacttcagcagtctcaggatacaaaatcaatgtgcaaaaataacaagtattcttatacacagataacagacaaacagagagccaaataatgagtgaactcccattcacaattgcttcaaagagaataaaatacctaggaatccaacttacaagggatgtgaaggacctcttcaaggagaactacaaaccactgctcaatgaaataaaagaggatacaaacaaatggaagaacattccaggctcatgggtaggaagaatcaatatcatgaaaatggccatactgtccaaggtaatttatagattcaatgccatccccatcaagctaccaatgactttcttcacagaattggaaaaaactactttaaagttcatatggaaccaaaaaagagaccgcattgccaagtcaatcctaagccaaaagaacaaagctggaggcatcatgctacctgacttcaaactgtactacaaggctacagtaaacaaaacagcatgatactggtaccaaaacagagatatagaccaacggaacaaagcagaggcctcagagactatgccatatatatacaactatctgatctttgacaaacctgacaaaaacaagaaatggggaaaggattccctatttaataaatggtgctgggaaaactggctagccatatgtagaaagctgaaactggatcccttccttacatcttatacaaaaattaattcaagatggattaaacacttaaatgttagacctaaaaccataaaaaccctagaagaaaacctaggcaatactattcaggacataggcatgggcaaggacatcatgtctaaaacacaaaaagcaatggcaacaaaacccaaaattgacaaatgggatctagttaaaataaagagcttcttcacagcaaaagaaactaccatcagagtgaacaggcaacctacagaatgggagaaaatttttgcagtctactcatctgacaaagggctaatatccagaatctacaaagaactcaaacaaatttacaagaaaaaacaaacaaccccatcaacaagtgggcgaaggacatgaacagactcctctcaaaagaagacatttatgcagccaaaggacacatgaaaaaatgctcatcatcactggccatcagagaaatgcaaatcaaaaccacaatgagacaccatttcccaccagttagaatggtgatcattaaaaagtcagggaacaacaggtgctggagaggatgtggagaaacaggaacacttttacactgttggtgggactgtaaactagttcaaccattgtagaagtcagtgtggtgattcctcagggatctagaactagaaataccatttgacccagccatccaattactgggtatatacccaaaggattataaatcatgctgctataaagacacatgcacacatatgtttattgtggcactattcgcaatagcaaagacttggaaccaacccaaatgtccaacaatgttagactggattaagaaaatgtggcacatatacaccatggaatactatgcagccataaaaaatgatgagttcatgtcctttgtagggacatggattaagctggaaaccatcattctcagcaaactatcacaaggacaaaaaaccaaacaccacatgttctcactcataggtgggaattgaacaatgagaacacatggacacatgaaggggaacatcacacaccggggcctgttatggggtgggaggaggggggagggatagcattaggagatatacctaatgtaaatgacaagttgatgggtgcagcacaccaacatggcacatgtatacatatgtaataaacctgcatgttgtgcacatgtaccctaaaacttaaagtataatttaaaaaaaaaagtttgcactggaagttctagccagggcaattagccaagaaaataaattttaaaacataaagattgtaaaggaagaattaaaactatatccatttataggtgacgtgtgtgtgtgtgtgtgtgtgtgtgtgtgtgtgtgtgtattgggaacaactaaggaatatgtatagggaatatatttagggaatatttatatatatatataaatcatatatatatatgttatgtatataacttgtgtgtatgtgtttgtgtgttccttaggaattccatatatatatatacacacacacacacacacacaaatataaacacacacacatatatataccacttatatataagttaaaatatatgtggaatttaacaaatatataagatagatagatagatagacagacagacagatatatatggagttcctaaataatacacacatatatacacacaaataaaactattagagttaatatatgaattcagcaagtttgcagggtgatatggtttggctttgtgtccccacccaaatctcatctcgaattgtaatccccatgtgtcatggaagggacctgatgggaggtgactggatcatggtgcggtttcccacatgctgttcttttgatagtgagtgagttctcatgagatctgatgggtttaaagtgtttggcagctccccccaccccctctctctcctacagctttgtgaagaagattcttgcttctccttcaccttacgccatgattttaagtttcttgaggacccccccaagccatgcagaactgtgagttaattaatcctcttctctttataaattacccagtctcaggtagtttttttatagcagtgtgaaaaaggactaatacatggggtatgagatcaatatacaaaaatcagttgtatttctatgtgctatcaataaacaattgataagtgaaattaagaaaacaatgcaatttatctcagcatcagaaagaaaaaaatgcttaggaacaaatttaacagaagacgtataagacttatacactgataactacaaaacattgttgaaagatttaaatatctaaaaaattgaaagacatcctgtgttcatagattatgagaccttgtattgttaagacaccaagctgatctgcaaattcaatgtaatctgtatgaaaattacaactgcttttttaagaagttgaatcctaaaatttatataaaaaggcaagggattcaaaatagtcaaacaatcttgaaaagaaaaacaaagttggagcactcacaattcccattttcaaagcttaacacaaagctagattaatcaagacagcatggtttgacatatagatcaaatgaatagaattgagagtccagaaataaacccatacatttatggtcaattgatttttaacaaggatgccaagacaatttaaagaattgtcaaagaatagtctttttaacaaatggtgtttggacaactagatatcaaaatgaaaagaatgagtttagacccctacagcatgccatataaaaatgaactcaaatttacatgtaagaagtaaaactatgaaattcttaggaggaaacatagttgcaaactttttacctttgatttggcaatggtttcttagatatgacacctaaattaaagcacaagcaagcaaagaaaaaaaaatagattagacttcatcaaaatttttttaaatggtgtgtcaaaggatgactctaccaagaatataaaaaagacaactcatcaaatgggagaaaatattaagcaaatgatatatattcccctctcccaagtgggcacaatatcagaagacaaaaatccccctgtgcccatggtgtctacatgaggaaaaaagaactagaggaggtcattcagcttccctggcacttgaatcctttctaggaagaccactgtggtcttacctcactggaggtaacagcatggctagacacccaagagtcaggtaaaaacaaagaaaggaaacagagttcatagtgaccagtgtgtagatattcgtcataactctgtgtttctcctagctttggtgccccattgaagataccagccaactgcatagcccactcacaaagctgaactggtcactttcagaagcatggtggaaagtttaacttggcctgagtccctagatgggtagactttacacccagattcaatgccaaccccaatactcccacccacgccaggagatgcctacctttccccattttagagaagcaaaggaactagatctgtttggcctgagagtccaagagtggctcagtttaaccaaaagcccatgtcacccaggcagtgagacgttcacctttgcccattttggagaagcgtagggactagacctgctcaacccaggagatcaaacagcagctcaactcaatcaaaatcttgcccctttgctttgcccaaataggtaggcaatcttcaactgtgcatttctaaagagcatagtctctgatcccacccgtcttgagcagcaccctcacctaacctcagagcccagcttgcagacttgtccagccacaaattccaaataacagaaccatccaacaaaggaatatatcctgcaaccagcctgacaagaggctattacagtacccagctaacagtttcaactaatagcaaagcccagcaactaatctctccagataggggaacccagatagaagccccaccaaacatcagagcaaagtttcccagccaactagtgaacccacaacaagctctgcctaccaggggttgtcactagctgctccttccagaattatagtctatactaaatattgaagatctagccccaccatagaacacataaggattatggaaaatcaaggaagttttgattgacaccttcagaaagtactaataaagatacaataatgaatcctaaagaaattgagatctataaaatgactggcaaagaatttagaataattatcttacagaagttcaatgaataacaaaaatgtatgggtaaaaaagttaagcaaaatttagaaaatacacaaagccagaattttcacaaataaataaaaacagtttaaaaaatagacattctagggatgaagaataaaatgcctggactgaaaatttcaatagaaaacttcaaagcaaatgaaatcaaccagaagaaagagtcattaagctcagagacaaaacatttgaaattatccagtcagaagatcaaaaagaataaagaataaaaaagaataaagaaagcctacaggaatcatggaataccatcaagagaccaaatctttatatagtaggattttcagaggagaaaaaaaaatagaaaaagggacagaaatcatatttttaaaaaacaatggccacatacctttttaatctgggcatagatcccaacattctagtacaagaaggtgtagaggtctccaatcaaatttaacccaaaaaggagttcaccaagacatataatcaatctatcaaaaatcaaagactaaaagttttgagatcagcaaaagataagaatcaggttgcttatgaaggagtgtcagcataactctttgcaaatatcttagcagaaaccctgcaggtcaggaaaaagtggaataatatattcaaaatgatgaaggaaaatacctgataaccacaaatactttacctagcaaagttgtctttcaaaaatgagggagaaataaaaacttccccaaatgaactaaagctaagggagtttataaccactaaaccttccttaacaggaattgctaaagggagttctttaagctgaaacaaatgaccactaattaataacatgcaaaagcacaaaattcaatggtattaaaaaatagaggcatattcagaatattcaagaactataattatggtgtgtaaagcaatcttattcttagtacaagggttagaagacaaaactgttaataactagtatagctgaaatgagtagacaagggatacacattacaaaatgatgtaatttctaacattggaaacaaaatgggtgggagaaataaaaatgtagagttgttttatgtaatcaaagttaagttgttatctgcttgaaataggctgctttaagtataagatgttctatgtaagccatatggtaaccacaaaacaaaaaatatttagtagaaacacaaaacaaaaattgaaagacttaacagtataccactacagaaaactatcaagccacaaagaaaaatagcaagagaggaagaaataaaatatcataaaacaaccagaaaacagttaacaaaatagtagtaagtccttatctattaataattaccttgaatgtaaatggactaagttatccaatgaaaagacggagtgactgaatggattttttaaaagacaagacacaactatacgctgcctaaaggaactcatctcacatagactgaaaatgaagggataaaaaatgattttatgcaaatggaaccaaaagagagcagggatagctacacttacatctgacaaaatagactttaagtcaaaaactgtaaaaatagacaaaaaacattatataatgataaatgagtcaattcaccaaaagggtacaaaaatgtaaacacatatgcacccaatattaggacaccaaatatataaaacaaatattaaaggatctgaaagaaaagatagagggcaatacaataatggagatttcaatatccactttcaacaatgaacagatcatccagacagaaaattaaaaagaaaacattggacttgaacagcacttttgacccatggacctaaaaggcatacacagaacattgcattcaatagcaaaagaacacacatttttctcaagccatacatggaatattctccaggatagatcacatgttagatcaaaaaaacagcccttagcatatttaagaagatgaaatcatgtgaagtactttatgaccacaataatataaaactagataacaaaaacagaaggaattttggaaaatttgcaaatacataaaaaataaacaacatgttcctgaataatcaactggtcagtgaaaaaaattaaaagagaaatttaaaaataccttgaaacaaatgaacatagatacacaacataccaaaacttatgggatacagcaaaagcagttatgaaagaaacagcaaaaaatgcctatatcaaaaaaagaagaaagattttaaataaacaacttgatattactctccaagttactagagaaaaactaatcccaaaattagaaaaaagaaggaaataataaaataataaaaatctgagcagaaataaatgacacagagacagaaaaaaatacaatcaaaaaagaaagaacttttttttgaaaaattaacaaaatcaacaaacctctagcttaactaagaaaaaaagggagaagactcaaataaataaaaccagaaatgaaagaaaagacattatatctgataccacagaaatgcaaagaatcataagaaactactatgaacaactatatgccaacaaattggataacctagaaaaaaaaagatacatttctagacacatgtaacctacaaagactgaatcatgaaggaataaaaaatctcaacagaccaataataagtaaggagattaaatcagtaataaagagtctcccatttgagaaaaagcccagggccttatgacttcatggatgaattctaccaaatattttaaaaaaaagagctaacatcaatctttttcaaatgctaccccccaaagaaatggagaagagggaatatttctcaactcttttttataaggccagcataaccctgacactaaatccagacgaggacattacaaggaaagtacaggccaatattcttgatgaacatagatgcaaaaatcatcaacaaaatactagcaaatcaaattcaacagcacattaaaatggtcactcaccatgatcaagtgggatttatcccttggttacaaagatggttcaatacatgcaaacctataaatgtaatacaccatattaacagaatgaaggacaaaaaccatatgatcatctcaatagatgcataaaaagaatttgacaaaattcagcattctttcatgattaaaaactgtcaagaaattacgtatagaggtaatgtgcctcagcacaataaaggctatatatgacaagcccacagctaacattatactcaatgttaaaaagttgaaaacatttcctctaagatctggaacaagagaattatgcccacttttactacttcaactcgactgagtattagaagttcccatcagaacaattgagcaagagaaagacgtaaaaggcattcaaataggaaaggacagagtaaaattgtcactatttgctggtgacattatcttatatatagaaaaccctaaagaccccaccaaaaaccttttagaactaataagcaaatacagtaaacttacaggatacaaattcaacattaaaaaatcaatagcattggccaggtgcagtggctcacacctgtaatcccagcactctgggaggccaaggtgggccgattgaggtcaggagatcgagacaatcctgcctaacatggtgaaacaccatctctactaaaaatacaaaaattagccaggagtggtggtgcatgcctgtagtcccagctactcaggaggctgaggcaggagaatcacttgaacccaggaagtggaggtggcagtgagccaagatcatgccactgcactctggcctgggctacagagggagactccgtctcaaaaaaaaaaaatattaatagcatttcagccaggtggggtggctcacacctgtaatcccaggactttgggaggcagattgcttgagatcaggagtttgagaccagcctgggcaacatagtgagacccccatctctactaaaaatacaaaaattagccgggtgtggtagtgtttgcctgaagtcccagctactcaggaggctgaggcacaagcatcacttgaacctgacaggtggaggttgcagtgagctgagattgcaccactgcactccagcctgggcaagagagtgaactcggtctcaaaaaaaaaaaaaaaaaaaaagaaagaaaagaaaagaaaaaaaagaaaaggaaaaaaaaagaaagaaaagaataagaaatcagtagcatttctatacactaaaaatgaactatccaaaaaaagagaaatcccatttacaataactacacacacacacacacacacacacacacacacgtaatacttagaaataatgttaactaaataggtcaaagacctttacactgagaacaaaacatttataaaacaaattaaataatatacaaataaatagaaagctattcagtgttcatagcttgaaagaattaataccataaaaatgtctattataccaaaagtgatctacaaattcatgcaatcctatcaaaattccaatgtcatttttcacagaatagaaaaaaaatcctaaaattttgtatgaaacaacagaaaaacccaaatagccaaagcaatcatcagcaaatagaacaaagctagaggcattacactacgtgattttaaattatactacaaagctatagtaactaaaacagcagggtactggcataaaaataaagacattgaccaatggaacaaaatagcccagaaataaatccatacatgtacagttaattaatttttggcaaaagtgccaagaatacaccatgggaaaaagatagtctcttcagaaaatagtgctaagaaaagtgtaagtctacatgcaaaagaattaaattggactcttttctgacaccatatatgcaaatcaactaaaaatggtctgaacacttaaatgtacactgaaaactgtaaaactgtaaaaagaaaatacaggggaaaaactgcataacattagtcttggtgacgattttttagatttggcccaaaaagcaaaaatagacaaataagattacaacaaacttaaaaatttctgcatagtgaaggaaacaattaacgatgtgaagagacagtctgcaaattgggagaaaatatttgcaatccatacactcaataaggagctaatattcaaagtgtgtaaggaattcaagcaactcagtaacaagaaaacaaataattcaatttaaaaatgagctgggtgcggtggctcacgcctgtaatcccagcactttgggagaacaaggtgggcagatcatgatgtcaagagattgagaccatcctggccaacatggtgaaacctcgtccctactaaaaatacaaaaattatctgggcatggtggcacgcgcctataaaaattagctaagcatggtggcgcgcacctatagtcccagctactcagggggctgaggcagaagaatcacttgaaccagggaggcggaggttacagtaagcccagatcacaccactgccctccagcctggcaacagagctagcgagactccgtctcaaaaaaaaaaaaaaaaaaatgagcaaggggactaaacacacatttctcaaaagatatacaaacggtcaaaaggtatttgaaaaaatattcaacttaagtaatcatcaggaaaatgcaatttaaaactacaatgagctatcatctcacaccagtcagaatggctattgtcaaaaagacaagcaataagaagtgttggtgaagatgtagagaaaagtaaacccttgtacactgttggtgggaatgtaaattagcatagtctttatggaaaactgtatgatgttcctttaaaaattactaataaagctgccatatgatccagcaatcccacttatgggtatttacccaaaagatttgaaatcagtttattgaagagacatctgcactctcattgttattgcagcactattcacaatagccaagatatggaatcatcccaagtgtccatcaatggatgaatgtgtaaagaaaatgtggtgcacttatacaatgaaatattattcatccataaaaaagaataaaattctatcatttgcagcaacattgcaggacctggagggtatatgctaagtgaaagaagccagacatggaaaaacaaatactacctgatctcacttacatgtggaatctaaaatgttaaagaagcagagaatggaatggtggttaccagggcctggggtaggagtaggggaatggaaagactttggtcataggatacaaaattccaagtagacaggaggaatacattcaggagatctattgtacagcaaggtaattatagttatataattatggagtataattatatactccataattgctaagcgaataagttgattttaaattttctcaccacaaaaaaataagtatgggaagtaatgaacatgttaattagcttgatttagtcattccataatggatacatatctctaaacatcaattgaaaaataaacacgtaaatagtaaaatagaaataagttaatccacacatgcacaccacatttcacctggcagttctacttaatctattatataacgtgcatcatctaatatcttaaacaatgtgccacatctaatatgttatacaatgtgcttctttatctcactgtgcttttcccactaaaatgtaagcttgacaaaggcaaggatttttacctttttttccctgttgtgtctctggccactcttacagttgggcactaaataaatattgaatgaataagtggatggagagagggaaggaagagaggaaggagggaggaaaagaagggagggaggacgagagaaagaaaggagaaggaagaaagataaagaaaggagggatagaggaaaggagatgagagtgttatgtgctcctgagtatgaggatgacgatacgacatctcgtgtttgggtactgagttggattttaaaatcgcatggtgcagtagcacatagcaaacattcaaagactgtgtgctgccttaatgaacaagcttccttaacttgcgtcttccacttcccttaattactgcaacctcctctttttcctccaaccagagaaggtctgtaatggaattcttgtgccttcagggggccacaggacaaaatctgcagctggaggatcacttcctatctctacttcctcctggcagaaggcagagcaagccccctgagcattccaagcccctgctccgatgtaccttgtcagggttaaaagcacagcaggttggtgtgtgcggagaccggtaaataagaaacaatggctttggtgtttggaatgtagaaaagctgctcaaatcgctcaggtgggtgctctatgaaagtaaacttccattggttccagttttatttcatcttgcctgtaagtgcgaagattgtttacagaggcatgcccaccgtcctaggcccatagtaggaccaaaatgttgatgctgaacatttttgttttctatgtttgctttaactggggagtcacaagttcaaacagccacaggaaccaatcctggggtgaagagtaggctgtgttggggactgtggtaaactagacggctcatgctgacacccagttccactgagggtggccacggatgtagggttgccagagttgtcacatctccatctctctctctctctctttctctctctctcattctctctttctctctcattctcattcttcctctatcattctctctcattctctgtctcattctctttctctcattctctctctcattctctgtctcattctctttctctcattctctctctcattctctgtctttctcattctttctttctcattctctctcagtctctgtctcattcttttctcccattctttctctctcccattctctccttctctctctcattctcattttctccttttctctctctcattctctctctctcgcattcactctttctctcagtctcagtctcattctcactctcattctccctttctctccctcattctctcttttttctcattctctctcattctctctcactgtcattctctctttatcattctttcattcactctcctctctcattctctctctcagtctctgtctcattctctctcattctctcttcctctctctcattctttctccccaagataagctgaatgtctgaattttctgtgaaatgtaatttttaaatgctagaaaatgacctgatttgctttgaaacacctatatttagattctgtattgttcatttatttatgtatacagtacagagttgtgcaagcatcaccagaatctaattttgagtacatttatatcatttcagtaagaaatagtgtgccccttagtggtcaccccttcatttttctcctgtcccccaccaagcctagacaatattttctgtctgtatagatttgcctattctggacgtttcatataaatgaaataataccaaacatggtcttttgtgactggcttctttcacttggtgtagtgtttcgggagttatctttgttttggcctatatcagaactctatttctttttgttggtggtggtaaataatattctattgtatggctacatgacattctgtctgtttattcattagccatcaaacaagcatatcacaggctggtcccagccctgggggacccatttttcaccatgcaacagcctcctggctggtgtccccatctcctgttcaatccccctgccctctgctgacacagggtgtgcatgcaaccagccagacagcccagggtagaaatattgggacaatttttctaaaccaaggctttgagcatgtcactctcctccatccccacctttatgctgaaatcaccctcctctcttggcttcagagtggagctccagccccttagtccaaaacaaaaacttttgcaagagctggccccaccaccctccacacccttccctgctcacaaaccctgtgctccaacacaccatgtcaccctctcctctcaaagcctgagcatgtccagtcctctgtccccttgctcatgctgtgccactggtgtgtaattcaccaattgtgggtcattctcctccactgagtggggaactgttctggaaggagaaggggtattctctgtcctcaggacttgggacaaagcaggtacataatgaatgtctgacggtggaatagacacaggccattcctccatctaaaatgcccttccctacattgtccatctcacatttgacagcagctctccttgctcacccacacctgatccaagcactgattatctagttcgtctctgtgctcatgcagcacctagctctgtgtgtgcgtgcatgtacgtatgtgtgtgcgagcgtttgcgtgacttcatcagatttcagtccttggggacaagcttttccccatattgttaaaaattcagtctgtgcaataatttgttgaggcctaatttgcatgcactgagatgcaaccatttaagtgtatagtttgatgtgtttcaagaaatgttcacctgtggattatactcatgtagccacagctgccatcaaaatatagaacatccccatcaccccagaaagctcttctgtgccccttccaggtcaatgccctcacgccccatccaaggcaaccactgatctctcctgacaccacagctcagcgtttgcggctgtggggcttcataggcacggactgaggcagcagacaatcttgcgtgtctgtcttcatttgcgcggcgcagcatctgtgagattcagccatgcagtcgggtctgtcgtgaattcactctttttgccccattcccagcacagtgcctgagtgtcaaattgaatagacttcaattgctgtgaggtgattaatagcaaattgtgtgttattcatgaataaagaaaaaagatgcaacgtgttctgggaggtggaaaagagaaagaaacccaccccgaccccgcctttctgttctcacctaacgaagtctggagttcagcaagaaaaggtgtgagggggtttttcaggaaacagataggccaccagggtccaaatcagaggtagagtggcacatccagcccaaatggaaacaaacgatgcaagcctatggcttaaatcagaaattaatctctactggtagtttccatgaactcttctccaggtaaacatcacatgtaaaagtaagttcctgtcattatagaataattagattataagaactaaatttatagtgtatactacgcattactgcagaattgtagaaattatgcaacccagtccttaacagaattaaatgggaatctatattttttctcagtaagtctttattgaatgaatggagtcatattctgtttgtgtttttctgtgcttttgcaatttctcaaattaaagataaataaacggtctcttcttggcctcgtggctaagatcaagtgtaaagacaagtaaatggtagttgaatgaaagaaaccaggaaaagttatttttggagtgtgtagggtgtgcctcgcctccttggacccacctcgtttctcccaagagcagacccagatacactaactcgatctgcctcccgcctcctccttctgctttaatcaactgtgggtcctgctctcttcaatgcctgcgtgtcagctaagtttgcaatcaccccgtttacagcttgaaaatgaagccctgtcttttctgcaagtaagaatcttcctgaaccatgcatccaaatgtcacatttccaaacatgttgtgagctgaggactccaagtcataaacttcaaagcaagtacttgtaatgggaattctgactgacagtcccttaattacagtctttaaatatgcacagtccctgacggagccaggctttctgaggaaaattcctgcctaactggttgaaaatgtgaacagtggggtataattccctgagctgcaaggagccacagatcagagaaaatgcaagagaaactctaaagacccttgtaggatgaattttgtcttttgcaggcggtatgaaaaccgaaagaggggagacaactgggacaaggagaaacaaatatttcctgtgcttgaagctgacacacatggtttatttgccggtgtttggagaggttagaaagcaaagatagcagaggaagaataggtttatccttgaggacagaacatgcatgctggtgagtgggaagggactaaaaacaaggtggctgggccgggcgcagtggctcatgcctataatcccatcattttgggaggccttggagggaggatcacttgaggtcaagagttagagaccagcttggtgaaaccccgtctctattaaaaataaaaaattagctgggtgtggtggctcgtgcctataatcccagctactactcaggaggctgaggcaggagaattgcttgaacctgggaggcggaggttgcagtgagcctagatggtaccactgcactccggcctgggcaaaagagcaagatttcgtctcaaacaacaaacaaacaaaaaatgacagggtggcccaaaacaaggcagtcccactgatcacggactccagtgacattaacagagaccagggggacatggttgcccctgtgtgccctgggtcacatcacagccactccttattggccctagccacaggatgtgctatgtctcaggcagtggcgtgtgtgcaggtaacttctccatcagagccccagaaggcagcatggcatcaggtttggcagtcttatgccacgttgagatcagagaccttgttttattagcacagggtgctcagccaacaagaatgtcaagctggtgtttttgctaccacagccccagtttaatgacagagagtaaccttgatatgtagtttggtgaccagttaggcaggaaatttatggcaaaacacagaaatgaccacactggagtggatttaagtcctgatgctgccaattaacagctatgtagctttgcccttgggccagagttaccacgtaaaacacaaatatccagctaaatctgaatttcagatatataacagataattttccacatataacacatactaaaacattatccattgtttatctaaaatgcaaaggtaactgagtgctctgattttaatttgctaaatctggccaacgactttctcttgctgaacctcattttcctactgtttccaagtggacagcagtgcatgtctcaagggggtttgagaccagctgagatgctgctggcccagcacagggttcctacactatgagggtgatcaactgagctctcagtgcttcttctccctcaggatctttgtctgccttttagctctttccaaatgttaaactttccataaaggccaatgttatgtgtcccccatggcagaacatttcttttctcaccatagaaatcaatttattgtatatttcaaaataactaaaagaatgaaattggagtgtccctaacacaaagaaatactcagtgcttgaggtgatggatactccagttgctctgatctaatcacaacacatcatatgcttgtatcaaaatatcatctgtaccccataaacatgtgaaactattatgcatccatgattaaatataaaagtgaataaaaaagaaagtacaagaaactcagggtcagaggtaggaaaggaaggcaggacttgaaggtgaccttgatgtctcctcaatcccaagacttatctgatgatactgctcttcccccaccccatggttccctttttggctgtcaaatagcattctgagccaggcatggtggctcacgcctgtaatcccagcactttgggaggccaaggcagatggatcacctgaggtcaggagtttgagaccggactggtcaacatggtaaaaccccatctgtactaaaagtacaaaaattagccaggcgtagtggcatgcgcctgtagtcccagctactagggaggctgaggcaggagaatcacttgaacccgggaagcggaggttgcagtaagacaagatggtgctattgtactccagcctgggtgacaaaacaagactccgtctcaaaacaaacaaataagcaaacaaacaaacaaacaaagagtgttctgtatatctctttcagagccagaagatgtggttggtgtgtctctaatcaagctccctgcttttgaaagggccagggagggaaatattgccgacgagatccactcggaagtggaaatatgcactgagctcctcccgcccactcgccttgcacactttggccagggagtcccactaaccactgtcagcaaacacagcttcagaacagctccagccatgttttacgccattctgccgcatccaacataatgtctaactacatacgtgcatcaataatcttttatgacatcataatgcattttagtgtgtggatggttatgatcttttagaggcccctatttagatctatggagcaaaataggaaagtttttaaaaaatgtaatctaattaatctaagcgcacttggatgcctattaaaattcacctgtccaggattttccatttatcataattactagggaacagccattctgagaaaggggccgcctcttcatttaatacaaaatgatgatatattatcctgatgcttttaggaatggtttagacataatggataggtctgtgtgacgaattctgtgaattaacgctgtacaattagacatgttgttctttcatgtagaacacacctccaagatggccgggagacacagatcatggagtgtggacaaaatggccccatggagccaccagcaggggaagggagaccatcccttaggtagctggcaggtgggcaacctctctctgattgcagatggcaaggccactggcccccaaacagtgccagcgtccctccatgaagcttggcatcactcagcatggcctagggagatgcgtcttttgagctatcaattccccaggattggtacccccgatccagaattgagacagaagaatagggtctggagacaacaagcctaaagccaacctgagggtggcttcttggaattggaccaaaaggaaaaccccacctctccatgcccaagtgacaagaggtcagagaccccaccctctacaaaacaccgtctctcctacatcacaaacaggaaatatctgattgattgatcatgggccaatccttcatttgcatagagtgtaaccaactggaggcctctaaagagtatctaggggtgttaccaaattcttctagcttaataaaaaccctaaagaacattccaatcagggcttttgagccgcttgctcgagtccactcccactctgcagagggtagttttgctttaatcaatctgtgcttttgttgtttcattcttttattgctgtatttgtgcattttgctcaatgaaaaaactcactgtcaagacttttcagccagtaacagaaggaggtgcttcctttcatgagtataagcagcaggcacttgccctggggcctccttcccttattgggcctagggagcagctttcctattcaaccacacccaagggcagcattgctcatctgggagtccacttcccctcaacctgcaaaccctgcaattgggaggcagaaccctgatgctaaactgagcaaacctgccaggatatcaccgggaagggagttgccagggacctgggggtccccagagatgagaggccagaccacatggatgcactcagtctctttccagacccctgccaagcaccacagagtgccgagcctccccttgtcccgcctgcagacaggaagggccggcatgtccagtggaactggcccagagctgcaagccttggatctgcctgggccctctgcaaggtggaggcatttctcgggtaaagcagtcctttactgcctgtatggggccaactgttctcccctgcatggcacagggctccattctcggtaaccacagccctgaagcgtttaggaaatgcccccaacacttcaccccccactgaatttgttgtgatggggcttccatgtggcctgggaacggcctctgtgtggcctctgggctcccccagggcgcacagaaatcagagcatcccagaaacagaccttgggtcagccagaggggtggacccagaaatcccacaggtaccaacacctgcatccccctgtagctgctgaagtgtgagggggacagaaaaacccaagtggctagagctcctggtccgtgtgctggttggggaagacccaggagaaagaaggaagtgaccagattgtaggtaacaatgtggcctggcctacctgcagctgggctattcttcaacattggtgtctgagtcagggacgggctgtctctccatccagcctccttcctggccccaggcctttcactctctccatcatcctgataaaactcccatgacacaccctctctatgcagtggctgtcaagtgtcagggctgtcaggctgtgatgagaaacacaaactctctgccttcgagaagtgtgaaaggcggcttcattcaacccaacatccagccccacaggtgttctatgtctgctaggcacagttttttctttcttttcaattgaaacacaggtatggcttgctctccaggtttatcccagcccccatgctcccctgcaataaactcctggcccacaggacttggtatttgttatttgactggaccctccaggcttttgagtggggaatctctgatcctaaattgcagacacagacccagtgccaaagagcacacagtcctgggggttggggtggtggggaggccaaggcacatacaaccaactccagcaccagacagaccaaatagcccccactctaggggcacaagccatgtgccatgaggaagcaaagggagggccagtggaatccactcgaatgtgcaggagggcttcctggagaaggagacgtcagaaacaagccctgaggaatgacttagtatctgagcactggcgatcagggcacactgcgtaatccaagcatggtgtgttcagcattaatgagggtccttggcaggactcagtgtacaatgagttcacaagaccagtgacttcagctgggctccccagagaaagagactgatacaaggattcctagcaagatgtgtgttaggagatgatcccagggcccacagaggacagagtggagggtgagatagggaggagcagaaagcccacagagggtgcattagtgagcagttactactgtgggcagccagagcacaatcttgctggggaccacacctcacaatggctgcacgccaaggggcagaggagctgggtcgtttgtccaccgactcttgccagcattaattgagggctgctcctggatgtgttgattccaggacagttccagccagccacgcatgcaggtagcaaagcaggttcctgcagccagagaaaaggcttcagcagagtcttggcacttatggcaggaaccacatcgtgtgtgcatggtgcaggccaaaaaggatctaggaagggcatgcgatagcatcatctgccacaggggagaatgcacgggcagatgggcaggaccgtcagagaagctctttttttcctttttttcttctttttctttttctttttttttttttttttttttgagacagagtctcgatctttcacccaggctggagtgcagtggcactatcttggctcactgcaacctccgcctcccaggttcaagcgattctcctgtctcagcctcccgagtagctgggatttacagacatgcatcaccaagcccaattaaatgttttatttttagtagagacagggtttcaccatgttggccaggctggtctcgaactcctatcctcaagtgatctgaccgcctcagcctcccaaagtgctgggattacagacgtgagccaccgcgcctggcccagacaagcccttctaagtgaagtgcaggcaggacttagctcactaggtgcagtgggaggagaggagcatgttgcttgtgcctggtgtgaagcacccccatctagggccatagggactgctaagcaaccccgaaagtttccataggcaaatctctcaaagtttcaatacatacaggatggcccctgtgacaagttgacccacggcatctgggtggtcctaggtgggaagtgtgtatggaggtggagggagtgtgtctggtcttccgatagcatcacttgccttatgtttgttcctgtctggcctgtcctaatcctgcggtcctagagttagaaggggagatgtctggggaagcaaagtgtggatgtggaaagtgtttcaaggtaaacataagcagataagaagcatggcgtctactggcctcgagctacagacagaaggaagacgcaaagcttagggggcacctgtgacagtgatccccacacacaccccaccagggtgaagcatttggtgaaggtccaggtcagattcatcctagaagtcatcagaagttgctaaaacacctatggagcctagcacatagtatgtatttaatatatatttatataacatttcatttttaaaatgcttaacattcaatcaaaccagctctttggccttgaagatcaaataagatttgaccaaattcaaccctttaatttgttttctgagctctatttcccaaaaacaatgttttagcaaaggacagatatgaagttgagaagaatgatttcataaacttaggaatcaaggttctttatacacaagacaatagaggctcatcactggtcagttagttagaccccacatcagcatctttgggagttgactagtcctggatccctaacacaaaatccaaacattcctgcagttattgacaggcatagatagcctgagtcaagacaatgcatcacattaattatttttattttatttttttttaaagacaggatcttgctgtgccacccaggctaaagtgcagtggtgtgatcatagctcactgtagtgttgacctgctaggcttaagccatcctcatcctcccaccttagcctcctgagtagctgggactacaggtgtgtgccaccactcctgggtaatttttaatttttttctagagacacggtcttaccatgttgcctaggctggttgcaaactcctgggctcaagggatcctcccaccttggcctcccacggtgctggaattgcaggtgtgagcaaccacacccagccacgtctcatttatattcaaataattactgacaattgatttttaagtaattattcttcccacccgttagcatggagcttggacccaacagcaaatatctgccacctaaaattgagatacagctcaaccctccaaatcctttgcgtaccctcaccaaggagcccctccatccctgcgtacaccactctttcaaagcccagggcctggaagggcctggctttcaccctgagctgcttccttacagaacacagacctgggttaccaacagagcctccaccatctccatcctacctccgacctcagagagatgccagtaagatgaatgcaaactttgccaagggaaggtcttgagaaagtcaaaagccatcattattaattccccgctgtttggctgggatggaagccactggtgcaccgatggaagaggcttgactccaaataaataaacacacgtcctttgggcagatgtcgggccagctccggctgttaactgatggccccgcactgtggcagctagcgcagtgtgggcaggcgaagtgacactggcagcgcggagtcttccgcctcatcgcaacaagcttggccacatttccaaatccatctctttgaaccgacacagacagcttaatgaagcaatatttatggaactgataccactggggagatggctgctccttctctccgtctcctatttttaatatttgatctggcaaacgtattattaaaggaatatttcatctgattactcttctgtttgactgcgcgtcttattcatgcatgctgggtgccaggggaaattataccgaccagtttgggagttctattatgtcattcttccaaacagccctttgctccgagtataattaccattcatgtgcaaggctgtgggcgctctggctgacctggaccacctccttttaatcacaatggcctcctccttcccctccagtcccactcgaggccctttcaggactcttttcctggggaccaagaactttctttcttgctggggacggtgactccatgcctgtaatcccagcactttgggaagctgaggtgagcagaacacgaggtcaggagttcaagaccagcttggacaacatagtgaaaccctgtctctactaaaaatacaaaaatcagccaggtgtggtggcagcgcatgcctgtaatcccagttactggggagcctgagggaggagaatcaattgaatctagcagatcaaggttgtagtgagctgagttcctgccactgcactccagcctgggtgacaaagcaagactctgtctcaaaaataaataaaaaatttaaaaaatgaactttctttctgagagtggtctctctggatatctgaaaagttgccttgatgttgttaggggtctctaaaatcactgacttgcttatgaagctgcagtttcctcataaggcagaaacagaaaagagatgggtgcaccctggcgtggcctgtccttggctatgagctcttcgtccagcatcagcatggtgttcaatttcccagaggccaccggtctcctgactctctgcctttccttttgctagcagctagctccaccttgacggtcttgaattgcctgataaatctaccctctttctgattgggcaactggctgtatttccaacttggccttaaaggtggggccagagggacattttgagcccctaaacaaggggagagcattcaagtgggtgtggcagaatctggccccaccatcctggcagagacccagcaggaggctttgtgcacaaaacagatggggcatgaccagtgtgcaggctcagctcccactgccctgctgacaaatgaggccagctcttcacctctcacgaatttccttgatttttgtttccaattgtttgctatttactttttctgtaagggccagatagtaaatgctttagtctctgcaggcagtactgtcactgccacaactacttaactccaccgtcataccaccaaataaaccatagatgctatgtaaatgaataagcgtggctatgctctaataaaacctatgtacaaacacaggcagtgggccagatttgacccatgggccatagtttccaaagtcctgctttagacttttctgtgaattaggcgtgcattttttacatcctcaaataccttagcctcataaaactaaagtcttcatttgtgagtttatgtatgtgtgtataaatgtgtgtgtgtatgtgtgtgtatatatatattcccctaatacattcaaaatatttaactaaaagaaaatgttttaagttatttcatattccacctgaatccctccagaaaatgccagatcagatgactgtttcttgagtgtgaaaatgcccaggggccctaagcaaatcattcctttcaggttttatcaaacagaaaagtgaggcctcaagaagcaaaccacatggtccctcagcacagggtcttggcagctccaaccctgactctgcagggttcctttctcctgactccaggggtcctagcccaaccttgcaggctatggcagccttgtcaactcacgcttgctgcacggatatccacccaaaggcagaccctggctgccatgatggaacccacgttttcagaggggctgtgtgcaataaacaaatgagcaaataaaagacatgtgattttagttagtgatcaatgcaatggaggaaaagtgaaaagtaggcaggataagggaataaagaatcctgggctgttttagatgatgtggtcagagagggcatccctgcaatgactccaagtcgatatagggtggatgagaaaaactgagccacacagaacgcaggcaggtgcaatctggactgaggtggaactaggcctgccacacccaggacacaggggcagccaagagggcagcaggtccatgagtgggaaggaagatggctgcagcagaagttggagatgtctcagcgccttgcaggtcccacaggtgaggttatgaggtcaggccttcatgccagcttctcaccaagactctggccactcccctggttgctgtcagagcacgcccccttggccctaaaactgtggaatcacagctcatattcttgttcttcttacccatttcttagctgttgctttgcaattcttagaataaaagtaaagttgcaggaaatttcagagcataaacataagggtacatttggatagttgcagaaattccccagccaaccagcagcagacagggccccacttaatgaaaccttcagcgagggtcaggtccacataccctttggcagacagtccaacctcacctggagttgctgccaggggtgtgatttccacaggctttcagcaccgctgatattcatgatttctcaacagctgccattatacaacatttagatgcaaaatggacaatacatcaaagcagatgttcttggaaatcctattaactccaaagggtttgggaaggcttggaggctggctccttcggcacatttgcaagcgagctgtgtttcagttcccttggtgtgggtggatgcagctttcctgcattcccaatcattcactcagctccagagccagagcaccaaaggctgcagaaatgaacacctacacctcacatcctaaaagcactacaaggacttctgtggagctgaggtcgcctgcaaacactttcatttatttactccagaatgaccagtgtgcacgttctcaatggcacctgacaattaaccatgaagcagtgcacctagagccagactttctggagaattccatggaaagcccattgtggggaggaaaaatgtgacagcaagaggggagggcttgcatctttctaggcatgtgggattgaacatcccaaagacttcttctgctctgatttgtttactgtctataaattgcagtgttggtgtgagtagggccatctgaggatcaagcatgatgatggaggccctgccccactggctacagagagtgtccaggccaggatgaatgtggtcatcatggttcctacatggttcctatcacggcagctccgtgcaacacaaaccctgactctccctccttgcctgcttttctccttggctggttccttctcaccctgcaagtcgcctcctcggagagaccttcccaggacatccatcagtacctgccctccccagccacgtctctctctgtcccgtcacctagttttattgtcttaataacagcactttccactaatggctacttgtgtggtttgttgtttcccactggtgtgggactccagggagggagctggcccctggtacttagagctgcagagaaagccactcctattattcccagccatgtgtggagcccctgcagctgcagtttgaggactgtggggttgctgcatgggaagtatagtcagcaagccgaaccctgcaccgagcacgcttcactgtttgctaaactctgacgctgagctcagagccggcaaggtccctcagcttccaacctggctgctgcagtagttttgagggtccttggcaggtcacccaaggaagcagaggcatttcagaatggaggagacaggaagaggcacatctcagcaaaaactaactttccctgtgcacagactcacccctcacccaggtccgcatggaattgagacaggccgacaggctggtttcctgttttaatgtggtttagagaaaaaaacaaaagccccttactcatgctatagtttacctaatttccagccaaccagcaacaaagacccaagaagcagtgagccacgagctcctgctgtagggggttagggacttcctccgcctacacgtgcggttggacttaaactcaccttatagtgaccttttcctccttttcatactaaaagtcacacccgtattacatgcaatgtatgaagaaggatgtagaaccagtacacaagtactagagaaacctcctatccatgccctgacaaaacccttcccgaaagaaccagcccacatgctaccctccagagcagcccgtccttgcccttttgcagtgctggcttcccttgtgcaaaagctaaatgaagctttctctttccttaagtgcaatgtccggcaatccatcttgattcctatcctgggagattgcaagaacccagggcgctgataacaatcccttcactcatggcttcgttttcttcattggtcagtggaagctgagtcaaactgcactgacaaacatccccaatatctccagggtttagcacagtgaagggcatccccgttttactgaatgtcccacatgggtcagccaagaggactctggtcctcgtcaccctcaggggctcaggctggggaagctctgtctccacctgtgattccatgatgacgaagtcagaagggagcaaagcaggcactggctgtgaggtgtcacccagaggtgacacacatcacttcctccatggctgatcccccaggaccccttcgactcattccacatggccctacccagacacccacccagaggtgctaggagtgcatcccacccagtgcccagggagcaggaatccgggcacatttggtaacagcacaaatgaccaccacccctcctgtgtcactgtctgtgctggggaaattggaaaggaactagtcttattaagagcatatgctgggccgagcgtcatggctcactcctgtaatcccagcactttgggagaccaaggtagatggatcacctgaggtcaggagttcaagaccagcctggccaacatggtgaaaccatctgtactaaaaatacaaaacttagccagatgtggtggcaggtgcctttaatcccagctactcgggaggctgaggcaaggtaattgcttgaacccgggaggtggaggttgcagtgagccgagatcacgccgctgcactccaccctgggtgactgagtgagactctgtctcaaaacaaagagcatgtgctatgccagtgttccctgtgctgcacacatttgtatcattattattatctcatgtgccaggagaggaaatctgtctggagaggaagggcctcagccaggaccacgagtgcgcaagcagaacagacagaacccaacactggggactgggccccagggcctttgcttttataaattttattttattttttcagttggggtcttattctgtcacacaggttggagcacagtgatgcaatcaaactcacggcagcctccaactcctggactcaagcaatcctttctcctcagcctcctgagtagccgggaccggaggcaaatgccaccacgcctggctcatgttttaattttttgtagaggcaggggttcttgctgtgttgcccaagctggtatcgaactcctggcctcaagcgatcattccacctcagcctctcaaattgctgggattacagcatgagccactgtgcccagctggtctttgctctgggccgcaggacactgtcctctgggcgctgcaaggccgaggcactatggctctcgtcctccctctgtctccagctgtgcgggactctgggtttgtggctgaacctcactgagctttatttctacatttgtgaggctggggacttaattcgtgctctgctcttgacttcaggattaagcatgggtgttgtgagcatccataaggcccaccgagctaggaggtctccagggaaactgctttcctcaccagatgcctgaagggtgccccattctgcaggggagagaaggaggctgggaccagcctgcctggggaccccagtggagatccgagcagaactgggtcctatcaagagaggagcaaggatgccagtacttcagaaggctacagtggcggagacacctttgaaagcattttattctgccaagtcaacaaccatttataatcactgtcatttcacaatggaaagggcaatgtaaggccaaaggggtggaaaaggtcagaacttgggaaaaactctaattgaataagtatagctatgcaaaacataacttgagtctgttttcctcatttcactgcaagtcagggcaaacatcagcacagacaagcacctgccagtgagaaccaaaaagcagtcttaccattgacttttagagttctttcgaccacaggccaggagctcctggccagcaatgagggcaccagtgcccggccacgagcaacagtgatcccacaacagtgggaagaatcaggatttgcacactccagttttcacgtgaaatcacttagcacttaccctccctgccctcaccacatcactgctgcaccctccctgctcagttttcttcctcccctcccctcacgctccttccctgcccctgtgagagcccggcccttgccctctgtgacctggggctccccacctcctggaatctttgggctgggaacacctacagcctcctccaggaacagtaattggacttttctttgagactgtccccaagctccttctccttgtttatctgctctggattaaaaggccatgaagaattgattttgcaaaggcttaataatcaggcacagtggacatgtatgtaattgaatgacagttccggattcatctttcacaacaactgtggtctcagagctgctgcgccaatgacaaagtggagacaaatgagcccttttagcatgatgctaattactgccaagtccagcctcagggttttctctctggctgggcttgggctggtccagcaggggaaggattcataaccctatagtcagaaaaaggatccgcccacctcggcctcccaaagtgctgggccagctacccaggaggctgaagcaggagaatcgcttgaacctgggaggtggaggttgcagtgagcccagattgcaccactgcattccagcctgggtgacagagtgagactttgtctccaaaaaaaaaaaggagaccgggcacagtggttcacacctgtaatcccaacattttgggaggccaaggcaggtggatcacctgaggtcaggagttcgagatcagcctgaacaacatggcgaagccccatccctactaaaaaataaaagatacaaaaaccagtcgggcgtgttggtgggcgcctgtaatcccagctactcatgaggctgaggcaggagaattgcttgaaccttgaaggcagaggttacagtgagctgagatcacgccactgcactccagcctgggtgacagagtgacagagtgagacaccatcaaaaaaaaaaaaaaaaaggagccaggaggtctcagagcttgttactgggaattgggatgggaggcagggctggcctctttatgattctgctgagtttccattaaatcaaagcaggtactgcagatcccccaattagtcagagggcaaatgatggaagcccaactcaaactgctcagacagtcatcggaagatattgccttatgcaaatacaaagaggcggatccaagcttcaggcaagctagatccaggtgcttaaagatgccattgggcatccacctctctccacttacagcctgctcttagctgacttcactctcaggaaggcttgccccaggcttacatcctcaagccaagcgaccccagtacccaaacagctcccactttccaccactagctccagaaaacgtgggcttggcttggattgggtgcccagcctggtgtatttaacacttactaagttccagacaccgtgccaggttctggagacaccaatataagacctgccacctttactcaaggagctcacagctttgccggaaaaactgggcagtgaacagacaacgtcatgagtaacctgtgtacaatgccgttccctgtgagaggccgagggctttattacagggcacagcttcacaacaaaattaaatttttcttttaactgtgccatcctccaagcctctggcccaaatatccttcacccagcagagtggtgaagagctcagagccccgcagtctgacatctgcatctgaattctggctctgccatttaggagttctgggaactcagaaagcgaattcatttctctgtgcctctctacagtgaggctgataagaatgtctacctaataaggctgttctgaggattcattgacaggatgcacacgaggcattgaattcactgccaacacacaacgagcgcggaacaagtggtctttgctattatttctattccccgctggctgctggactagtgatgggggttttgatgcaggacaggcgagccccaaagtggggcttcacccaggaaaaaattcaacagtgagccagtggtagggtagaagaaaacagctttatagaagcagcagtgttacagctcttggaatgatacagcccagtgatttcccctgcagagcagggctacccacaggcagtatgctgagagcagcagctcaggccagttccgcagtcagatttatacccacttttaattacatgcagattaaggggcggtttatgcagaatttctagggtagaggtaataacttttgggtcattgccatagaaagtggtggtaacgcctgggtgttgccatggcaatggtaaactgacatggcactctggtgggcgggtctgatgggaagctgcttccgccctgtccctgttttagctagtccccaattcggtctggtgtttgagccctgactgcggggtcaagtcccacctctgacctcagtttgaagccccgctctgtggggggaaggctctggagtgttttcacccagcacagacaaaggcccactttggaggcaggattccaccagacagatatctgagacagaagttgccccccaagacaaaagggactctgatgttactcagggatggaatttagaagtctcatgctggggaggcatgagttcccagggtgaacacaggaactggaggtgaggggtggtgctgaaatgggcctcgaagccagcttccagcaccagcatgtgaagtcctgaaccaagggagagagggggtggcaggaggtggatgggacatgtttggggtgggggtggcccttgggagaaagagttcatgggatgaggctcagcctcttgaagggctgggggtgccaaggccacccacataccgccaggcgcagccccttcacggcacatcacccagcaaggactccaatccctgggagggggaaatggaccaggagcagtagcaggcacctccagggatgcccaatgtgcatacccgctgaggacaccgctcgcagttagagcatggaatcagagctttgagggaggctggcagagctccagttttgcgtgggttatccaccctcctaaaataatattttcaacatatctgttttctgccaacagaacggaatccaactttcttagcctggtgtgcgaggccctccctgtctctggctgcagcctacaaacagaacgcaaggcagcttcctcggccaccccggcaatggctctcacacatgtcactgatggggaggaggaaaaagcccccagacccccagacttcacttcctccaagatcagcagaggttttctttctttctttctttctttctttctttctttctttctttctttctttctttctttctttcttttttttagatgagatcttgctctgtggtccaagctggagtgcagtggtgtaatcatagctcactgtggccttgacctcccaggctcaagtgatcctcccatctcagccccttgagtagctgggattacaggcatgtgccaccatgcctggcttttttttttttttttttttttttgagatggggatctccctatgttgtctaggctggtctcaaactcctgggctcaagtgatcctcccacctaggacttccaaaaaattcaagtctattttaatgttctttaaatagacttgagggaaaaaccaacccctgggaaaaccaggggctgaaagccctgtcctcagcgggagagcctcagcgttcttacagaccaggtccctaaacatgtggcttcaagggtgtctccctttcctctccagcagtgacctcctcaatgtgcctgttcagtattccataaacggagagcatgggatgcaaaagctgccttggttcagctggggaaaaaatgcctttgagagttttatcaactactagagacagcccctttataaggagtatgcggaacagccaccccattgtctgagaacagtgcccatgcagagatgagaccagggaatcccggggtacaggcatctccactgggcacagctacctggcccactcaaggttgtgggacctgggggaccagggaaactacccatcatctgggctgggctgagccaatcgcatcctcccacttgagaacttgaggctggaatcaatccctagtcagtctttcttgtgcttgagctgggagggacgaaaggctgagacagtcatttccaccttgaagaaggagaagagaaggtcacacagcagtgagagaagagagacaacaaagaagggaagatagagacagcggctgctttgccaagtcccacctggggaggttggctttgcgtccagctcatggggtcctcgaactgcccctatgtccttttcccaattaaaccggcctgggcagtttccgtcctccacccccagttatcccaaagacgaatcccagccacttccacagccctcagcagatccctgggaatactcaacaagacaggaactgagcttctaccccttaagcaattctgcaatcttttcttcattggctgcctcctcaaagaccccaagtttggtgccacttgggctggacacagtgcaaggcccagggaaccaaactcagccctctgccagcacagaatgtgagacgctcaagaaaatgttcacgccgtgggtgctgctggctcctcgatgagcgctggactgagctattaccatatttcactgccatttacagagcacagctgtgtgtgctttagtttaataaacagccatggtttgtttcctgggccaatatttcttttgtatttactgggcttggtttttgtatcttggtttaaaagattggctcatgggtctgccttgtgtccatcaccttatttctactgacttctgcactcccagccgccccttcttcatgagctttcagcttgcatccccttactggaaggagaagccattctgacaccctagacccactgtggttttctcctctgcctccacctggtttctgtatctgccaggagtcgcttctgctgggcaccccattggaaagatagcattgcagagtgaaaaactccaggcacccccgtgccctgtgactcactataggaccatcacctctagctcaccatgtgatcctgagcatgtcacttcctcccctgggccctggtttcgtggtgcgctggaggaaggcactggcccagagctcctccggcctcccgcaggtcggaccagccatgtggctgtctccctgcactcccgcagctcatcagggctgggctcagctaggggaggtgcctttcctgcaactcacccgcagctcagctacagatgcacccttgtcagtgcctggttcgggatacagccaagcctctcaggccaggcgcagcctttccagatgcatggcccggctggagtcctcaactttgtatagtgtccacacatgccgccgagggtctcccgagtatctctgtcactttcctgcattggtgggtccctgtgagctgtccttcacctcccaaggcttccactgggccctaggacccctgtgttccagactggagttggggagcaagaaggtgtaaagattgggatagataggcacaaatgctaaaagctatttatttttgtccactatgtggtaatttttaaatatcctcataaatattttggccctcctccctttgcaagatgagctaaccccctccccatgtgtgggccatgcataatgatccttattaggagaatgtgacgggagtgatgctgtatggctcatgctgtatgtatgggaataatgctgctcatgaaaagcatagcttctgctgggagccctctctctgggattgcttgctctgagagaagccagctgctgggtcagggggacactcaagcagctcggagactagagccgtgaatggaggaacttccttcccaccagcacccaacaccaactcgccatgtaggtaagcctcaggtggctttccccctgagcctcaagtgtatcttccaacgctaggtgaggctttatgtgactgcaacctcacaagaaaccctgggccagaactccatgccaagccaccaaatccttgacccagaaactcttgactcagaaaggctgataatcagtgttcattgttcaacccaggtgcccatcagcaatggactggataaggaaaatgtggcacatatacaccacggaatactacacagccatccaaaagaatgaaatcatgtcctttgcagcaacatggatgcagctggagaccactgtcttaagagaactaatgaaggatcagaaaaccaaataccacacgttctcacctataagtgggagctaaatcgtgagtacacatggacataaagataggaaccatagacactggggactactgggggggaaagaaggagggagggcatgggctgaaaaacacctattgggtaccatactcactacctgggtgacgagatcatttgtcagaaagagaaaaaaaaagtaaaacaaaaaagagtaagaaataaatattgattgttgttttaagtcattaactttgggtgatgcattatacagcaatggatgactaaaacaacccgagtccccccagaagctaagtctgtgtcacgcatttctctctgtgcatggagaagcaggagagtccttctatgatcgctgagttgcctttagtaagatactgagcaggtgaggcttcactgcattgctgtgcagcaacctcacattttgcccagctctcatgcacgtggctcaggtgcctccatgcatctacagcctttagctgaacgaggtctcgtagggcctgagtagccaccacagtccagggctggtccagaaaccactcactttaggagaagcatggctgagcccagagaagctcctgtcaccaagtccacaaatgccaacactgaggcagcctcacgcatcatgttgcgaaaaatatttccctgtagcacaggaccacaacctcagctcaaacctgtgctctgagaaccatggtaggagcatgacatgggcagtcagagatctttgctaatgcagcctgctggcttctccaaggcatgtctggaccaaggtgtatgaggttgcatcattccctcctgacacaggctctagatgccaagagcttgaggagagtgagagggatcacgtttgtgctaagccaggcctccagccaagagtgctggaggcagcccagcctctctcgtcctcatgggcaatgacagatccatcatctaagctctaagcatggagcccagtgctgccagggatgcctgccagctctcaatgtgcccttatgggcctcgcattataaagggacagacattcaagtcaatccagtttagcaaacactatctgaccatctactgcctgtggggcacaggagtagtggctagaggaaagaggaagccagtgcagctcctgcctccaaaagctgcactctctagcaagtgaagaaatacaggatcactcaggcaaaatgtggacaaggctggagctaaagtattagctgtctctgcctcttctgagaccctaagaattgtgaacattaagagaagttctgtcaaagggtctatctttggcatgggctctgaagaggtcataaagaaaggcttcggccaggtgcagtggctcatgtgtataatcccagcactttgggaggctgaggaggaaggattgcttgaggttagtaatggacccactaatgtaggaaaatttgagaccagcctggacaacatagtaagaaccccatctctacaaaaaaaattacaaattagccaggcatggtggtgcatgcctgtagtcccagctactcaggaggctgaagcaggagaattacttgagcccaagggtttgaggctgcagtgagctaggagctaggagcaccactgtactccagtctgagcaatagagcaagaccctgtttcccaaggaaagagagagatcaagagaaagagagaagaaaaagaaaaaaagaaagaaagaaagagagagagagggagagagggagggagggagggaggaaggaaggcaggaagaaaggcaggaaggaaggaaggagagagagagaaagagaaagagaggaaggaaggaaggaaggaaggaaggaaggaaggaaggaaggaaggagagagacagaaagaaagagaaagagaggaaagaaggaaggcaggaaggaaaagagagagaaagaaagaatgagaaagaaaagaaagaaagaaaggaaagaaagaaagaaaaagaaaagaagaagaaaggaaggaaggagaaagagagagaaagaaagagataaagaaaggaaagaaggaaagaaggaaggaaggaagaaaggaagaaagaaagagaaagaaaggaaggaaggaggaaaggaagaaagaaagagaaaaagaaagagggaaagagagagagaaaggaaggaaggaaaagaaagaaagagaaggagagagaaaggaaggaagaaagaaaagaaagaaaggaagaaagagggagggagggagggaggaaggaaggagagaaagaaagagataaaggaagggaggaaggaaggaaagaagaaaggaaggaaggaaggaagaaagagagagaaagaaagaaagaaagagagagagaggcttttagtgaggggcaacaacacaacagaagacatcatcatggaggtgacatcatggaggtgcaggacagcagggtgtgctcagggactgtggccatgactctatcatgccagtaggttattcaggtcagctagcgccatgataatgttgcataacaaacaactcctaacagtagcagcctacaacaatgagaattcgtttctttgctcacagttgtctggttgctgagatgtctgtatgctagactgctggtcaaagtcaggtctgctggcatgtctttcattccaggacttgggctggaggagcagtacttacctggagcacattcttctccaagtgcaaggcaagagggcaagagtccaggttcaatcatattgaaagcctctggctggatgtgacatacatatctgcacacattccattcgttggagcaagtcacgtggcctgctcagtaggaggagcaagtcagtagggcagagaagtactctctgcttacagtgagcctggaaaagtgtggggagcgaaggaaaaacagtgaacaaataatacaatgcaatgcaatacaatacaatacaatagatggtgaccaagaagtcataatatgagactggaaacacacactaggcctcctgtgggagagactagattgttgttcaccaaacaatttctcttttcctctgcacacaaaactaggtatttcccagtctccttcgccattagtgtctgaattctggacaatggggtatagcagaagtgatggactctgcttgcaggcccagcctgctacaacttcctacttcaccctccactctctccttgtctgctgggtagatatacaaacccagcagaggaacctgtggcccaaggtgatggcagagccacaatgtggaaggaggctgggtccctgagtcaccgcctggacagcagccacccggaagatctacttgacccacattagtctgtttcagcagttgtaagtaaacttgtattgtgctaagctacagggatttgggggttatttgttacagcagttaatctaccttactattcccccgtgtcacagaggccctcggtgtggggctaagtgaaacacactgagaaacgaagtcaggcaggcttggattgaaatatcagcactagcactgtttagcaggatgaccttgaacaaattgctttacctctctaggtcttagtttttcatttttagatgggatttatagtccctgccttaaaaatatatatatatatatataagtgacaaactctgttactcgaagaggtggggtatcttgctgagacttggcagagctgcactattgatccaggagcttacaagaggcttttgagagatggcagcatgatgtatcaaggcttcagtcttcctggggctcactctgctgtgggcagggaagtgggtggggagcaggatggccctccatggagtgggcctggggagacccctgctgcaaggtaggcaggaccttctgcttcaccaggggtttctccacgcatctgctagaagcttgcagaaaagggggctgttgattctcacctcttagcctgccacctgcctctgactccccagaccccccaccagtgaaacctgcaaaggccctctgaaccccagatgctgaggctcaagcttaaccaggtagacagatgatctcccagagtaagatgagcagagggagctgggagggctttggaggccccaggacaaacaccaatgcaaaggcctgtggcagccttgagtctgggtggccaggcgttacttacattttattattttagtgggattttgctgctgctattgttgttgtttgtagagataggggtcttgctatgttgcccgggctggtcccaaactcctggcctcaagtgatcctcctgcctcagcctcccaaagtgctggacttaacaggcgtgagctaccatacccggtctagttttgttctgttcggttttttttcctgaaagacacagaggaagagagcatagacttgggagattttaaactcccagctctgcctcttgcttgctgtgggacttcaagcaagctgcttacatctctgttcctcagtttcctcaactgtaaaattaagccaattgcagttctctccgtgtggcttttttttttttttttttttttttggtgaaaatgacatgagttaatatttgtaaagtatatagagctatgcctgggatgcatgaagggctgtgccagtgtttgttcaatgaataaagcagacaagagagtgaggcaaagggagagacaggcaatgagagggggaggtggagggactcaagacagagagaaagagacagcagtcagatggcacagatagggaggccaccaggtgcacagaccgacaggaacagacaagcaggaaggagggggcaaaagcaaaagcctttaaaaattagagaaagagacccagtgaaaaagaaaaggggaggccaaaatcacaaaaatccaattagaatggaacacaaacggcgttcttatttaattgcaaactgccagctcaccaggtggccttctgaaggcatctcaggtcaaaaaccatcacccatccctgataaagccatttgcctacattccctgaacagaggggacagtggccagcctctgaaaatggtccagctgtgaaagcccagaaaccccaagccgcttttgcagcaagtgtgcacaggaaaacggcaggtcccacacatttcccggcactggacactcagatcctgtctcctcccagggcaccccagttctacccatggcccagaccctcatcctgtcaaaagtccctaggacaaggcttgagacaaattaagaattttattgaaatttttatttcccaatgcagccaagctgacaacctctctctcaagtttcagcctaatgtgatttcaaatggcagccttatacacctctgaaaaatggtgtttataatcaaagcaccagcagctccttaactctaggggcactcctgggctcagctgtaatgacattagcgtgtttagagctgtcagaagcaatgtcactaatctgcgtctaggagggaagaggcaatgataaatgaatggcgtctctcaccataacgggtgtccctggtccgccagctacctgcctggcaaacagctatgactcagtccctgctaagcagaacactggccctctccctggggtctgggtctgcctggtaggcttggacaatcacagtacccaggcagagaaggagtgaatcagaagcaccgtggtgatatggaaaccactgaagctaagaaacacggcagcacttggtgagaattcaagaaaatggcctgcctctactcatgggaacaactgagcccaagccccaagccgactgccaacccctgctttcccatgtcacactcaatcttttttattttttctttttttgtggagtcttgctctatcacccaggctggagtagagtgccgcgatctgggtcactgcaatttttttttttttttgacacggactcttgctctgttgcccaggctggagtgcagtggtgcgatttgggctcactgcaatctctgcttcccgggcttaagtgattctccttcctcagcctcctgggcagctgggactacaggtgctcgccaccatgcccagctaatttttgtagttttagtagagacaggtttcaccatattggttaggctggtcttgaactcctgacctcagctgatccacccacctcagcctctcaaagtgctgggattacaggcgtgagcccggccacacctttgctcttgacttcatcttataaatgatggaacacataggcagacgtacagctccattttccagcgcgtaaaacaagggcatgacagtccaattcttgggggtgtcacagggatgctggggaatgacggattacagtgacatagatggctcagagggtggcacacagcaagccctcagcaggtgtgacctgctgtcgtcctggctgctatcattcctcatcacttttattagcttctgttaatattgtaatgaaattaagtgacatggcatgttttcccatgcagactgaattccccagggcctgagtccactcccacttttgtctctgaccccagatgcaactagaaatgcactcaaaatgtatatctccctagcacatccgccagaacaaacatcagcgtgccgtccctgagggaccaaaacagacatccccagagcctctgccccatgtctcacctgcagctggggctaaacagtcatcattgcaatgaatcagcacaggactttgattatggaaccatcagcatccccgtttcagagaggagaaaccgcaggatcagaaagattcagcaggaggagaggcgggaggctgacctgggtctggaagtcaggaaggctggtgcttcacacttcactcccatgtctggccttccatgtggcccctcccacaactcacaagatgcttctgcaggcaacaccagcctcccttggaaacagaagggccacgacagggcacacattcccgtgtcggatggagttggtggggaaaagataaattagcaagagtgggggaagaaaaataacttcctgaggagagagcagcggtgctcagttttctgggaacacgcacacgcggactcagagaaacacacacagcacaagcacacacacacaacatgagcacacacaaggacacacacagatgtgagtgcacacagcacccacacaggcaagtgcacacacagaatacacacaaaaacccccacaggtacaagtgcgcacacacacacacgcacacacacaggcacacctgtcagcttctggcacaaagctaacacaggctcacatagaatcacaggcactcacatacacacacacaccacacacacccacatgctccagtcatcctcaaccccagcatagaagcattaggcccttgggcacagccttcctagaggaagcagcagaacttgctcagagctcacttccacaactcctccctccctccccaccccctgtgcccctgcttcagacctgggcagcccctaagttctctgcaggttcttgagcctccttagttctggcagctgaagtccccagcctctagggtggcacccagggaacagccatccaccccaactagagagggtggaaatctactgaagggccagtccggctcctggaacagccctgggggcaggtgctccctgaagcccataggactctgtctccttggcttctctccctgcctctcccttggcctttctgtagaatttcacagccactgatatgcaggaaacagcgaatacctggtttcaaaaagggaagccgtgctcaggagcctgaacacaggaggcccgaaacagggcttgtgttgcatggacctgaagccagaggtgagggcgattaggaaattctttcccacatcaggggaaggatgctgttgaaatgggaggcccaaggcatctctgcaggacagagactggacatatgcccagagaggttcaggtccgtgagtctggaatatcctcctcctccccagggacaggggagcaggtctggggcaggcccattggttggaggacggggaaatgagctgtagatggtgcccctttgaccctctgatccatcttcctgtgcctcacagtctgaccaccaacactatgatcacatagttcatgcaggttctcgtaaattcattccttcactctcgactgtgaacaaatcggctgttgccttcatgctgctgaaaagctcgtccaccctggctgtttctgctccatgcccgcctgtctgcacaggggagtgccctgccctgagggaaaccaggcattcttctgggccagacagtctcctggaaatgaggaagggagagaattgtctaaaactgctggaaagttgaagagtacaccacatatacacagaagcatttgtcttttcaacacactttctctccccttcagagggaccagggctgaaacctgagctgattcagcccaaaggagcttggtgactgcagggagtccactatcagcaacctccttcctcgaccccaggagcccagagtctcacctgcccagaatgtgccaatcactcattcattcaacaaacttcctggatcaactgggccctgggcaccctggtgctgagatgaaaggccagcctccactgcagggacacactctggagagagagataagactccaccagcgactccacatatggctggaagatctgtattttaagagaaacgtgaaccagaacttgcttaaccccaagggttgaatttcaaacacggaattggaggcattggtgagcaagatatgcacacacacggcatcatacagcctgctttctaagcgcaaggccaaggggaagaggtggttcctgccacactctgggaccccgctgggtgactgtggcctggcatggtgagctgggggccagccactgccctcaggacagcagggtcctctgcctttcccccgcagagtggcctggcctgcctcatgcttcctgcagagctggaggctgatggactccagacccagcacttctgctgcggcctcagccattctcccagctcctccccatctggaggtcgtgggtagccctgtgagggtgtgggcttgggagccagctgagcttgggagccaactaggcttggattcaaatcctgcctcggtccctctgttctctgaatggaaatcctcacctacagtgggggagctggcagtattcctgcagggctgctgggttgaagcacaggtgcaggcacaagccttgctcaacaagtatcgggaggctcctcccatctggagagcacccagggcacggcatgtggcccaacaggaccaggctggagatccagggaaggcggggatggggaagccccaggaaccccctgcagacaggaggctctgccctgagactgcttcctcctgccaagcccccgcaattactcaagtgcaacaggcgctcgtggtaatgaagttggatgcctctgagtccatttaatgatatttaattatgcaccactttcaactgacaggctgagggagatctacacctagctcctgaccctgggcgggctgcactcatatataggtctcatgtagactttaggactgcttgtcagaaactgtgcttttgcctggagaaaaatgactcagaacaaagagagccggagagcctacaggcacagcgttcaggcaccttccagaggaacctgggaagggtctctaggcctggcctcctagttcaacaatatctcctgggcacctactacaggccagacattgtgtcaagctctgggaataaagccatgcacaagacagttgtgcagtacaacctccgcccatggggtttccagcaatgcccagatgggcagacatgggcatgggagaagggagggctttggagtggagaagaaatgggggcaagctccagaggcttgtgtgctttggggcctctgtcaaagagagcccccttttccccaagccctgtgcacctcccacccacactcacctgggtgccacctgtcccagcacctgagctctggacaacggaaacttagctcgttctccaagttgatttctcaaggtttgcatccaggaactatctagaggtgtaaaggttagccttaccacagtgcacagatctgggcacactcagccaagctgttggtgagataaggcgctgaagaccccacagtacccttcaggaggaagaccccaatcccactgcccagacagaacttcatcatgccatgcccgagttccagtcttcctgagatttttccattgttcttcaagagaaaggaaaggaaaggaagaaggtgggaaagaaagaagaaaggaagggaaaaggaaggaaaggaagaagaaagaagggaggggtggcaggaaggaagtggggagccgagatggagacagatgtggtaggcacgtgtagatcagccttgcccaggcttctgctgttcttggaggatgacgacgattctctccgtatttaagaagctgtgagtttggcctcctccagttccctggggcttgtggctgttttccaagccagtgttaagggactgaggacaggctgtgccctccacggatgggacttgctggacgacatcaagacatacaattccgctctccacagtcagaggtatcgccatccacttagtcagtctaactgaaaatgcatctgcaattcctgttttgtttggttttgtttttaaggattgctttccctagcctatcgatctccaagcctgacatagccttctgtaattgtacccgagcccatccgccagaatgatgaaatgcctgtagtgtcacctgccaatagtgatacgatttaccccctagaattctccccggtggaggtagcacagccaggctcactgtcatccatgattccttggggaagatggtttctcaaacaagatgactgtgttctccccaaaagacaccaagtttccagaacgcttgcatggacagaacagaggacgaagccaacacccgcagttgctggggacaaccgagaaggctgctgtgcatctgtgctcagacatcagcatgtgccccagccagaggggcctcccaaggctgaagaggatgccgtgcacagcagaagggccatcctccacctgccccagagagcagtggcttcttcaaggtgcctgtaaaccaaaaagcatctgagacgggtctcagtcaactcagagtgtattctgccaaggttgaggacacacccaggaaaaagagacacaagtaggatctgtggcctgtgctttttccaaagagggtttggaggacgtcgatctttaaaggggaaagagcagcaggaggggaaggaggaaagaaagaaaaagggctggtaggtagtgaggagagtggtcacgtgcttctgaggctttgattagcgctcactgagtccacttgttgcagtggcaggagggtagagaaacggccaattatgcattcattttgtgctcagtaaatctgcactttacataaagtaaaataaagtaaagcatggagcagagaaagaagccagatgcgtttgtctcagggtgagtggaggaatgtctcggcccgtctttgtcccatagctgtgaaggtgagctggtcattgacgttgtcagcgtcagattccacagaactcatttgagagctagtttagaggggacatgcggattctgaaagatctgggggcccacaaggaattcccttgtgattaatcagtgaggaaagccacctggggagacgtatggccttctatcactgcagctatctcttcagagaagaaaagaaggactcagtttccaagcttcccttttcccttggcatagtgagtctggggccctaagattggattttcctttcacatgtctgtcccttgagccccgcactcatcccccagcattctgcaaacttccccaggccagaccctacggtaaggacttggacccaagcaggcagtgtagatggtgatcctgggaaacacccacgcgggaggaaagggacagcagccaggacaggtgtgacaatgagcaggctgctgctgagggcatactggggaggtgggcagggcaggccttaggctgtccccctgggggcaggtgggctggaggatgcatggacccgctctggtccatccttggctcctgggggcatggagtcaccaaaactcctgggctgccccacacagaccaagcccactcttgttccaaaagaggcccttgggagaaagggccacagtgggcatgggaatgatgggtgccaagcagatgtgggcatggtggggacagggtctgcagtgtgctgagtgcttggccgtggggttacaatgagtcacacagtctctgctctcaaggagctcccactgggcacaagggaaaaaaggacaggagacacagcccctgagaggctctcacggcctcccgcagcagcatcggtacccacacggcctggcctgaaagtccgcccggcctctgggcatgggagatgggcagaattccgtgctgctggcctgggatcctgtcaccagcaggagacagtaacagtaacaaaaccacaccacaaactgagtccacaggtctgtgcctcccacgcaccaaaccctgtctctggggatgacagtgagtaggaggagaaacgtgtttctcacatcgggagacagaaacaggaggcagggcgctgctctttcatctctcaggcgatgcatgttcatcacacacagagtccgggggggcaggagcagcttcaagtctctctgagctgggagctcacctctcacgggtcacccaacctctctgggttccagattccccatggggaagacccaggcacattaagcttccagacagcccagagtgggaggcagcagagtggagtggaggaggtggcgcccagcccacgctctgcatggtcaccaggctcctgagccagacatgcccccaccgcccctaccgggcagcggcctccagctgcatcaccgtgtgtccagaacacagaactcacaggggcctccggaacctcctgccaggcctggtgttaacagactctcctcccaggaccccccatatcctgcgtgacaaaatagatgacatcaggaatcccaagatggagtgcctaaggggtgcgaggccagagtacaggtgcccactggccgagcgcctgctcccgaggctgactcagctctctggagctcactttgctctagaccagccagcgtgtccaccctgctctcctcccactcctcctggctgagagatctccaaaagcctcacccccacccgcaagcctggccagcttctgcagggtgggggcacagctggagccaaataggagccagccctcctcaaatgccctcctgtcccagctgagacaaaggagcctccagggagctgcccagaccctgagcgcatctcacctctcccgttgaggaggacctggtgtagaaaggagtgctgggtgttggggggtacaccttggtcattttggccttcctcccaccatgacccctcttgccctcaaagagtgctggacagaatctttctcagagggccaccccatcgggaagtcccctacgtatctaacctccatccatcatgctgtaaggcagcctctttcctctccttctgctgttagttgagatgggctggagccgagcttgtgtccaaatgagagctgctgtggacccagtcatggctccgtcagtgcccagcgggagcctttagtgagaatatcagtgacagggatggcagttgtttgctgaatgcttcctgtgggccaggcacggctaagtgaaggatctcacttaccatgtgatgatcagcctctcataggtcaggaggaggccaaggcagttaaacaacttggccaagacccagccatgggtgagcacagagctgagatgcagagtggcccctgccctgtgcctgcaggacacccgccactcctgggaggcctcagcattgggtgtcaggagggacccaccgagtccccccaagagcccctcggctgtgctcccctccccctccacttaggcactggcccctccagcagacccctcagaagcccagtgacatcgagggagcactgatttgcaatgacagattgagcagctggaaccctgcccatccatcctcagaactgccttgtgctcccagcaaccccacagccaaatcgcagaaaaagaggctgccctccagcacagccagctctccaggcttgcacctggacgcgtgcccactctgggcctcagcccctctgtctgtgatggaggccagaggcccctcccactcataacagggctggcaggtaaggggcaacattgccttcctgtggagttgcacagtccccagaagcaggtggtgatttaaacaccctgattcgcctgtaatcccagcactttgggaggccgaggcgggtggatcatgaggtcaggagatcgagaccatcctggctaacaaggtgaaaccccgtctctactaaaaatacaaaaaattagccgggcgcggtggcgggcgcctgtagtcccagctactcgggaggctgaggcaggagaatggcgtgaacccgggaagcggagcttgcagtgagccgagattgcgccactgcagtccgcagtccggcctgggcgacagagcgagactccgtctcaaaaaaaaaaaaaacaccccgattcacaacacaggccctgtggggcaccaggcagtggcaggcacaggtggcccctggaagacatgagtgccctggagaaggaaggctgggcctggggcaccctgggctgccctctgcccaagccacaggccccagagactcttcccacccaagccagaagtggtgagtcccatctctggcaagtctcagccctgccaaaggcagggtctctttcaccaggaactcagcgttctgcatcttcgagtgtctatgtaaataaaacaaacttctgtctgtctgccccccacgccctgccccatcacaaggcagccagcgggtcttagatcagggctgcatctgtggtgttcccactcaaagcagcctgggcgctctgtggtgcccacactgccctccttgaggactttgaaggcacctcggaggcagtccttctcagagtggctgaaactcagaaagcatcacaccattcattcggagaccccacgcatgaagagagctagggtaggttcagctacaagccccagatggaagggcccaggggcagggtcgagctgcatgagccactcctgggggcagccctcccaggtggcagcagctgagtgcattgttggtgagacgcatggcttttctgagaagcacgggtaagttggtgagctgtgctggagggaacgaggcccgccttccacgtgctcccctttcagctggtggcaggaggctgggccccggtgactccccaggagtgcctccagctctgggcttctgcagcatttcattcctccctcatggggcttgttggaatctgtgtgtccactgaatgggggtcatcatttcaaccacagcacccaagcacctcctcagcagggagctgtctttgtgcaggatgatgctggatacgctgctctgcactcagcgggagaggcaggtgctgctgggcgggtgctgcagggtggcaggtgccgctgggcaggtgcacaggccccctcctcagagcccggcatgctggccctgccagaaggatgccaggaagcaagaagtgggggcacagaaacgtgtggctgtggacaggcagagaggagtgcgagggcgttctaggtgagcaaaggctggaagcagaaatgtgctggtgatgagaggcccatggacatgccggggaggagggctgagtggaaagggcttggacaccaggctgggaggtagaggaaggagaaaaaaatgggcctggattggcctgaagctagagagactgggagaggcagagaaaaggaagcagcgataggggcgaagagtaatggaaatggaggcagaagagagactccgagaggaaagacaggaaggggcaaccgaagaacaggcagagaagaaaatgcgggtccagggcagggaggggcgaggaggccacttgcacttctgctgaggggtgcctactctcctccctggccacactcgcacctcctggaaaccctctaggtcccagccatggctcttgatatcccctgagcccaggaccaagatactatgctgcagccttccctctctagggctgccaagtcgacagccttctccaggtcctggatagtggctgggggtccctgggaggcaggtccggcctggggagggggcggtgccgggaggctgctgtctgtgccacagaggtcactaagaggctccctgctgtgtgacagtggccccagatcattggagtacagtgccgcaggccctcccagcctgaccttctgggagaccccagggcgtgccggaggtctggatagtctccctgtcctgggtccagggccaggcccgggactgagagctccgcacagtgaggcgcgcaccacttgagcccagcagcctggggaatggacctcgcctctccctcgagcgctgggaggggcgggtaaggcctaacaatgtgaccatctgcttcacccctttccactctctggctcctcctctgtaaacgagctccacaacattccagaccgcacgccaaatcggaaaactctggactcacaaccacgggcttaaatgcctaattaagctcattctttgaaccaagccatatttgaatgcatctgtcagccctcctccagctcgcctcgcagcggggtgggacagcgctaacgggagtgggagaggcagcgcagcctggcagacaggcccctgagccgtccccagcctttcctggtccccgatctgccctggtggggctgttcgaacgcttggtccctgaggttttacagtcaccagattcatctgtagcctttgctcctgggcctgcagtgaacccctcggctccccacctccctgtccccgtccctggaaggcttggcgggcacctgcctcggcttcagactcctctggtgcagcacctgccaagcccaggccctgccttgctggggaagctccgtgtagctgaggcctgcgtcagtttcctctatcccggaccagagatggatgctccctcccttctcagcaccctccattcaaaccatttgtggcagccgcgccacaccagagggtgcaggtcgcagcccagtgctctgaagagggggccacggggagccaggagaccacaggcgtgggttctgagcccacgtccgctgctgcctccccgggtcccggcatcaattccccacccgctcacctccctgagcctgcaacaagaggatgtggatgaacagtgttccactgtgtgtgtatattaataccacgttttatctatccgctcacctcttcatggtcattctcggcagcaaggatgtttagagaatgttatgctaagtgaaaaaagccaggaacagaaagacaaatagctcatgatctcactcatgtgggagctgaaaaagtcgatcgcatagaagtagcgagttgggtgctgtggctcatacctgtaaccgcagcactttgcgaggtcgaggtaggaggtcccttgagcccaggatttcgagaccagcctgggcagcatagtgggaccccgtctctacaaaaagttttgtttttttttttaatttgctggtagtggtgggatgcatgcctgtagtcacagctactggggaggccaaggcgggacgatcgctggagcccgggagttggaggctgcaatgagccatgatcacaccactgcactccaacctgggtgaccaagaaagaccttgtctctaatgaaaaaaaaaaaagaacagggtagaatagtgatgaccagaagcagggaagggtgggaggacagccagagatggcttaatggctatagaactacatctagacaggaggaataagttctagtgttctataacactgtaagatgactatcattaacacaatgtattgtatattttcaaatagctgcaagaacgaattttgaatgttcccaacccaaagaaataataaatgtttgaggtgatggatatgctaattaccctgatttgattattacacatttctacatgtattaaaatatcactgtacctaatgaatgtgtagaattattatggtcaactaaaaataataataaatgcaaaaaaaaaggatgtgaggaataactccactcacggccctccctggggtgcacctcctccgtgtacctgaccacacatcaggggaaggcacagagctgggacagaagcccagaggtgtcctgtcacccccctgctgcaggctgtcagcccctcctcatcacttgcagggcccagacaaggcagcccacccgccacaggtgatgggacccccagccacccctccggccccccaaccctgtgcccctctccccagcacccctctggttctgatgcgacaagccttctacaggaccagtggccacactgctcccaccctggccctcacactctctgccttctcttccagaaatgcttgccccttcctccttgttacctggctcccccgatcccttaggcctcccctaatcctcaactggcacccccagcccctgtgtggccccttccatcctggcacttgtctctcctgctgacctgggagctccaaagcagcaaggacctcagctgtctccctccctgatcctcaggttcccagcacccagggctgggccaggcttcagctgagtgctctgctgttacctgtagagtgagtgggtgggtggactttataaccatggcccaccagccttgacctttcatacagtttgacagacctcttgctgccccaggcagccccatggccctgaaggcaagggtacccctgtagcacatcccagggacagagccagactctactacctccaccccctgcaacaccattttctttcctgcccttccctgttgcaagcatattcaaatgtttaaattctgtttggggaacaattagcctgacatatggtctcatcacgttttgtcttccgatggaaaaatccaggggaaacttggaaaatgatgactggcgaggctttaacgtgtttttgctttttttgatggtcacaagcaagccacagatgaaaagcctgttaccatctggtccaaccctctcatctgactcagggggaaactgaggcccagtgagaagaaggtaccagcctaaggtctcccagatgcaaaatccagagcccttggcacttgcctctccgcctcaataaccttcagagagttggacctaatctttgcagtggggtggtggaaagaggggcttttagggccaacatgctcgagttctgtcctcgagattgtgtggctggaaggcttcatacccctggaccataagaggatggcagaatggggaggacctgcagttccctgtctagacccctctttggtatccccatcaggcaatggcttggccaaccaggcccccgcttcactgcccagtgacgtccagaccttgttgccatccaccctgcagctcctaaggatccagacggcatctgccaagaagatacagcaagcctgcctggaatcagaacccactcctgtgactgccagaaagagcccactccctgcatcttgccccgctgggcctcatctttcctggggatgggggtgaaatacccagccactttctggcccctagaggcccgatgtgcacatagacgggctggatgacatgtgcctgggctcacttatggagcatctgtcccctccctcaccacaatatcaaatcccgcaagcagaagcaggaggaagtctgtctctgcctgcgtgtggtagctggcacatccctggtgctccatgctgtgggtgcccggccactcgcctctacaaggacagtgctgtatgctgacaaagcttttccattctgcataatggttttgtttggtttttgttgttgttcacaagaacccaggcaggtatgattattatcatgctgactttgtgaatgagacaacggagactcagagagtgaaggcgacacattcagtaaggggcagggccaggatgtcccctgtgtcataggctctagggagctcaggcactcctagaggggagatgtgaaggcatctccctgggctggagctgaatgaggataattcccctccctttgttctgcaaggagtggagtccctggagctacatccagtgccatggtccagaaagggcagacctgtagccaagagatgtcccccaagcaccgtcacatgcctgaggtcctgaggatgctgtggaggggccaccctcagtgcacgcctgagccgacactgcagagcctggctgtgtagaggttcccaggaaggacctccagcaagggcagggctagatcccgcctgcccacagggaaggagaagcacaggtggggagagcacaggtgctctttccctcccgatgtatcagctgggggcctagcgcacaggccttctgccaggagtggaggctgcatgggcattctgcaggccaccccgtccccccagaagccccaccacagacagccacatgttgagcctccagctgacagggcacagctctgacaacagtgagcagctgggggaccacactcgttagctcccatttaggagaaaaggcatgccttgtccttcctccctgagctgggctcctgcagggcctggccggtggcagttaaagcatccggacgctttcggactccctgccgcaggaggggctgcccggccagggctagcgggtgaccatgctgtgctgagcgcccacagaaagggctgggccctacagactaatccattgtaggggcatggatgggagtcgggaggctcctgttgctacaaaatgacagtccatccatccaatgttcactgctgccagctctgtgggcccccaagagccacacggtctctgacctggggagcacacagggaagagaagccagcccagaggtagatggcttagcctgtacatgtggcccatggagggcctggtaggcttcctagaagaggcatctgacatctgggtcttgaaggatgaataggagtttgcttccaagggcggatgggagagaaatagtccagacagaaagcacaggccatgtccagtcacagagctagaattcttcaaacccaggtctctctgctgtcaaagctggtactcttagaagctgcattctgctgcttgatgcagggggagctgcaaacaccaagccaagacttggagaagggcctaggaacgggcgcattcaggtgttgtcttcatccatttcggctgccataacaaaaataccagagactaggagagacttgtaaacaacagaagtttattgctcacacctggaggctgggaagtctaatatcaaggccccagcagatttggtattgcatgagggccccccacttcctcacagatggccatcttctcactctaacaaaacagcaaggaatctctcaggcctcttcaaaaatggcattaatccgtcaatcccattcatgagggctcctccccagtggcctaatcaccccccaattctccacctcctaaaaccatcaccttaaggaccaggatgtcagattgttttgttttagagacagagtcttgccctgtcacccagactggagtgcagtggcacagtcacagctcactgcagcctcaacctcctgggctcaaaggatcctcctgctcctgtgtgtaaatctcccacctgctgagagaagccagctccccaaaccacatgcacatcagactctatctccagattccatgtgaaatccaccaaacgtgggccacccaggcggtggagcaccgaaggagacacacatgaggaagacacaggaaggggctctgtgtcacctgggactggctctgggaggatgctgcagcattggctctcagggacacagagcaggcagggacaccctctgggacagggacaggacagttagagtgtggaaagatggggagggcagaggacacaccacacagaagtgtggtacaggcaaaggcatcgagagagaccctcccagggcaggaggggacagaaatggtccagacagaaagacagcctggagggagccagccacactgatgatgatggataacatctgtggaaggtttggaaacaggaaatgacaagagcaaaaaataaaaaataaaataaggaaaattaacctagccatggtacagtcagaaaactactaagtattccaggaaaaggttggagagagaagggtttctaaatttcattctcagaatctaaaataaaactgattttctggcctctgggagctctggagaagctctggaagttgcaggacctgtgcagtcaccacatcttccagctttccagccaggtcatcgctccccaagtcccaaattgtgtgactgtgaccacgatggtctcaaggtgaggggcaatcagaagggctttcaaagacatgaggtgtgggctcagaggcatgcaccaactcatacatgccaactcatacacacacacacacacgcactcacacacatgcgcacacacgcacacacatgcactctcacgcacacacacacatacacatacacatacgcatacacagcagctcagcggtggtgcacattttctgttatcaaaggagacaacaaagaggggtcatgaaatgcagccagcagatggaagcccgctaaaatgtcagccagaagaaatagcccacgtcagaaaaacaaaattccagtttagcaaaatccttccctcctcccccactcctcagagaaaatttcccgtggaggcccctggaactttggcaatccaagaagagttatttattctggaccgccgcgccgctgtgcatgttaagtacaaaaaggaaaaatgctttcggatttggaaatggggttgcagtcgcagatggtgcctgaacatgcataaattcggtgactgcgtgaacagatggaaacttgaaggggaaaaaaaaaattaaaaaaaaacaacctagcatttatctgccaggccactgcggagctggagaaggggaatctgtcacttgactaggagggtctcggtcttccaatctgtgggatgggggtaagaaaccaccatactcaatggtcattcccagctgagtttcagccctgtctctgccactgaggagctgggggacctggccccttacttaacctacttcttcatgtgaccccggggataatgcagatgacctggcagggttgttgtgagaattgcctgaagtcatccatgcataggacctatctgtacctagccagggcgacagccccatgagtggggcctcacttgccagataaagcccggagtagcccagagaggaagatggagcaccctgaaagctccactggtcggtcccacaggagaggggctggggagagagagagaggaaatagagacggactcctcccagcttcccctttccagaaggtttctgggctctgggcaagagctgcacaggcatgctgttcaggagaagccgacggtaggccaggctgcaagggctgtgccaagaaagggtctgtgggcaggttcagtgggaacgtaggaagaatgaagataacttagaaggagggttctttctctttttgtttttgagacaggggctccctctgtcacccaggctagagtgccggggtgcattcatggctcactgaagcctcaacctcctgggctcaagatcctcccacatccgtgcaccaacacacctggtgatatgggtcagactttgtgtccccaccaaatctcatcttaaattgtaatccccaggtgttgagggaaagacctggtgggacgtgtttggatcatgggggtggttcccccatgctgtcctcatgatagagagtgatttctcatgagatttgatggttttataaggggctcttaccctttcacttcctacacatcctctctcacctaccgccacgtaagacgtgcctgcttccccttccgccacgatcataaatttcctgaggcctttcctgccatgaggaactgtgagtcagttaaacctcttttcttataaattacccagtctcaggcagttcttcatagcagtgtgaaaatggactaatacacttgggtaattttcttttaattttttgtagggacaaggtctcgttacgttacctaggctggtctcgaactcctggcctcaagcaattctcccacctcggccttccgaagtgctgggatctcaggtgtgagccaccatgctcagagccaaagggaaggttctatccagggtgcccagagattcttagcaagtcagtcctcagattctgctccacactggggagtccacatggtacggtgaattgactgcaaaaaaaatagccacagttctccacccctccctgcctccaggcccccaaggacattttgcagctactccctgaggaggtggcatctacttctccaacctagcagggtgacctgctgtggctgacagaacccagtggcagtgagtgtgtgtgccaatgcgaggctgagctgccactctctttggcgcttctacttccaccaggaggacaggcccaggttggcctgctggaggaggagatgcgtggagcagagccacactggccccaggggcccagccaagggccctaggtggaagaagatcccacagccaccttgccaacccgcagacaaccacaggcccatgagtgagccctgccgggcctggctcagatccgtagagccacaaatgacccactgttgcacagggaaaaaaaaacacatgtttacaattgcatgtcaccaggtctcagtggtttttatgcagcgattttgtgacaactgacactgacctaccttctttcaccacactcccactccaaagcaatttctggctctggagagaatgggggttggggagagtctcagcacaaacccagaactacagttcaaaactcagaaactatgattcagaggcaaagggctccctccccatagaccatggcaacagctccaccactaagggccaagtcaccagattgtctgagagtccctctgcttgcaccactagtttccctgatgaaaggcagaaacgccagccatctctgaccgaggccatctctgcatagggagcttctggccctcagctgtggggctggcactgcagagagggcatccccacccctgcacgtgcccacacaggtgaaagaaagcctgagcagctgcccccagcacaggctggaaaccctggagctagtcaggaaggcagccccagcagaactctccccggcccccagtggatgcctccagggaaaccctcccaccagccccacacagcctcacagaggcacagatcctggattgttttagctccatgcagcccagcagggttctatctaacacttccctgagtaatcataacctgccaaggtgatggggcatgtgcccatcggggtggccgtggcaggcagcgtggtgagctctgtgatgcagagtcagggatctgagctccacctgcccctagtcctgggcagacccctggaccagcctccaagttcatctgaggcctgagtgctgcagaggatggtcccaggggagagagcctcagcaagaaagaaggagtctggccgggcacagtggctcatgcctataatcctggcactttgggaggccaaagcaggtgaatcacttgaggccaggagttcgagaccagcctggccaacatggtgaaacccagtctctacaaaaaacagaaaaattcaccaggcatggtagcacatgcttataatctcagctactcaggaggctgaggcatgagagtctcttgaacctgggaggtggaggttgcagtgagccgagatggcgccgctacactccagcctggaaaaaaagaaaggaaaaaagaaggagttgtcttctcctcccacccatctctgcttctaaaactgcccatagcttgtctcatttgaaaacacttcctggagaatcatccctcaattttcattaattatgaatgtaactttcctcttactaaattcaactttcttttttccagttgctgtaaagtctcattcctcagagccatccagggtgctctcctgggcacagtcacctctgtctggaatgcctttccctacttttctatcctgcaaactcctgcaaatccttcaagacctaccccttttccatgaagtcttccatgatttccctgaacagtgttaatggcaccatcttctgggctttctgaaacccaggctgtgtattaatatctccatgggttctgaccacagatcagcaaactgtggctcaaaggccaaatccaactcacctctcatttggcaaataaagtttaattgaaacagagccaagcctattcatttacttattgactatggctaccatcagactacaatactgatagagacgatatggcccaaaaagccaaaaatatgtgctatctagtcctttacataagtatttttgtgcactgagccctgcccgagactgtgctcctctctggggctaggacaagcaagagggccgcttgccctctggaagaaagcttgctgaattaatgattggatgaatgagtgagtgatggagaagcccatgttttcaattcaatgcacaattcactgggccagtgtttccagagggccccgcggaactctgcatggaccaccgcatgcatcagggtttcagtgtatactgtccgccctccacgcccatgcattctgcatctgcagattcaaaaatatcaaaaatctttgggaaaaatcaataaaagcaatacaaaaattaaaaataatacaatttttaaaataccacgtaatactttgaacgtagcatttgcattgtattaggtatcataagtaatctagagatgatttaaagcacttgacaagatgtgtgtaggctatgtgcaaatgcaagccattttacatcacagatttgagcatccttggatttggggaaccaaagcaggtcctggaacctatgtcctgtggatgcccagggatgaccaaaagaaggtgttacaggcttcaaggcgtatgggcaacctgatatgctggacagcgccctgcaccacatctcagctcatccttttgctccagcagttgcaggagaaaccagaaggaggtgctggcagtgcctctgtggcaatccacgtggctttctctgcttttgcctctgggataccccggatacccaggaagccactcagccatctggtgcatatccaccctaggaagtgcaggggagttaaaatccacagcgactccagtgggcaattctgatgcatgttctacacgctgccccagagggtctccagtcacccaccatggtctccctccacccctcttcacctttcctgagggtgcactcctgcttcccgggaacatatcccccaaattaactatctacacacaagccattgtctcaggctctgcttcggctcggggtatgggatatcagtctccagcacctgggtttaacctggtctaaaccttacggcgggacttgtcagcatcttctgtatctttaatactctgtcaatctccagcaaggacatctggtaaatctgtttcctggggctgcagcaacaaagtgccacacgccaggtggcttacaacagcaattcatcctctcgcagttctggagccaagaagtccaagatcaaggcgtccacaggtccacgctccctctgaaagctctaagggagggaggccctctctgacacttgtcaatctccctctcattcctcttctgacaccactaattggatttgtgcccccccaatccagaatgatctcatctgcagatcatttatttaattacatttgcaaaaaccttatttccaagaaaggtcctatttataagtaccaggagttgggacttcgaaattcttctggaggaacactagtctgcacaggacgttcagtgagtggcatttcttacacttctttgatggtaaaacttttttatccaccagagtacctctcaggactggtgctcttcaggaaaatgtgtgttcaccagtattccccaagaggacgaaggccacctctgtcctgtccaatgctgcagcccaggacctggcgtggtacctgtcatagacactgtgccagcaagcaggctgggagcaagctgcccagacagggagaagctgggagagaaatctcagcacaggagcaagagggacacccaggaggctcatccatggtcccttgagagctcctgggctgcctatctggagctccagagagcgggctggactgagagctgagccagccccgggctggcctccccgcttccctgcgggcagagcctcctccagccacagcctggctgctggcaccagtgccttcctgcctcggggaatgcctggttagccctgactgggaattcaatgggggcctgcaccaagccctccactccattaagctccccactccaccaagccctctactcaaccaagccctccactccacttcctgaacactcagagagtctgatggggacaaaccaggtgctctgaggcacccttggcagacaggcatgaaggattagaaacctctcctaaggtacactcacacctagccagacacacctctctgtggggccagactgttcttgaagcagccctctaggggcgcttgcagagggagtggggcactgtccacacctctcccaacccgaggagctcccaatccttgccttctgggtaggtatcagcacaacttcaacctgtgggaggccccagttctccattaacgcactaggaccaccttccaaaggccagaagccagtgccgctggcacttggcttgtgtttctcttgaggtttggaatgaagctgtccatgaacttttaaaatggctgctgggcagtgagcccccaggctgcaggtgctgggccttctagagctccgaaacctccgcgtcaggggccaaccccttcagcaagttgcttctgcagcagtgagtaacacacctgcacacggaccagcttcctcccagggcccttcctatggaggccactccagaatcccttctcctcgtctgaccctctggaccctggacttccactgcagcctcccccaatttctgtggcctccaaaaagcaaaccctccaaagagaggtgcccccactctaacaatacactgagttggacaaggcagtgctggtgagcccaagaccctccccagggggtgcggtccctgcagggtctcattaggtgttagtggtgtccccggggagggtctcaccctcccctcgcctcctccagccgctgaccagcacagggccccacatacaggagcttagagcgggtttgctgactcattggaaggcaaccagcaggtagggtttccaggctctgcctcaggaggcagcctgagatggacctaccagtcatcttcatgggcagagcagaagtgcagaggaagcaggcatttgtatttgatcaggtttttattcctggctcagcctgcaaacagtaaacatttcattgcttgtctcacaattacattaaaaggtagataaaccccttctagcttacatttggcatttcagcctctaatccaacaaatcgccctttatcccctctttcatacgcacgtgcgcacacagtcggggctctgtgaccggcagggagctcccgcctcccatcttcagcagagcagcccggctcccggcttcagggccacacacagcagggccccagctctggccaggctcttacttgcaggacttctcaggaccttcgtatcctatagcagcttttcctaaatgccctggattgtaaaaggcccagcccacatgagtcagtaaaggaggagacaagtagggccccatctgctgcagccaggaccggtggcgcccattgtgtcatgtctgtcccaccctcgtgagcagcagagccagagctgagcacagcctggggtcgtgtcaccaggtccaggtgctccccagggaggtctggggctggggaaagccctgagccactgtggaggggaggggcccgggctggaagcagaacatcttctttctgaacccgctggggcctgcagcactgtgtgagctcaacccagctctcaactgcctctgggccttctctcgcatctccaggtacacaagcacagcatggatcacatctggggccgcatccagccacttgattccttgggaagcaaccccacagtccttcaagcacactccctgttcccaggagaagctgcacatggtgaggccaccatagcctgctggtggcagcctgttggccctgacccataccaggctgcccgtgccaggcagcccatgccagctcagggctcccttctccctgccctacagctcacaaacccaggccttgattctcttcccctaaaggcaaggaccctctcttcccagtgcctctccctctgcccttcctgtgtctggccttccccagaataccagttcaaagccagggaaatctaggctcctgtggccacatgtgccagaggcgacatacgcccagctttgggggcctatgtgctccaggaacatgcatatccaggaaggcagtcagcatccacctgccccacactcctcccttgatctgggggtaacttccctctccaaatgaggggtgcttttggagacttcccaccatcatccccaaaagccctgtgacctgagccaaaccagttaggctccttccctgaaacttttcccaccggaactagggaagagaggccacccatcactcctgagggggtggggcaagtagctctcagaggtggtatgcattaaagagagagacacggagcagggtggggaactgatccctgagatagcccgatgcttggtcccattgtccctggggctcagtggccctggccggtgcacccaagcttgcttacattgggtttggctgctgctggggagccccagttgctcctgtgacccacccccacccttctgcttccactcagtggcacagtgcagggaggaccctggggtagcggttgggtgtcactccaccaggaaaccccggtcacagcttgcccctcttgggcacagtttcccatctgtggcatgatcatattgccttgggtggtctcagtggctttccaaactcaaagggtggcggctcctggctcaggtgctgaacctgccctgctgtgtggccacaaggaagtagctcgacctctctgacgctctgcttcctcacctagggacttcgaataatatcacccctcccctcacagagtcagtaggacacaatgagctgggggttttcacacgcctagcacagtgcctggcacgtggtgagagctggttgtgggaagccatcatcatcccagcacctcaactcccacacacctgagcctaagacccccaggaacacgcagcacccactggctggggcctcctccttccccagtaaagagccacaccctgaactggggcttctgcctcataagtgaatacctatgacgatcctgatgaccccagtaatgacgcataagcatcacacacacacacacacacacacacacacacacaattcacatgcctgtacatagtctcacacacagtctcacacatgcacactcacacaagttcacacacatgcttacagatgcacattcccatacatccacatgcatccacatacatgtgcacacacatacacataacgggtacaattcacacatctgtacatggtctcaccatgctctcataattgacacatgctcatatgctcacacagatgccactcacatacttatacatgctcacacatgtgtacaaattcacatgtgcacacaatcacacagtgctgccacactcacactgacgcgcacacacactcatgcacaggaaaacatatacacacgtgccctctcaagtgggtgcaggcactgatcatcacataggtacacagtcatgcacacatgcacataccgagtgtgtgcacaccctcactcacacatacactcacgcacacctcccccggcctcctctccacccacactcacacatacactcacacacacctcccccggcctcgtctccacccacactcacacatacactcgcacacacctcctccggcctcgtctccacccacactcacacatacactcacacacacctcccccggcctcctctccacccacactcacgcatacactcacacacacctcccccggcctcctctccacccacactcacacacacctcccccagcctcctctccacccacactcacacatacactcacacacacctcccccggcctcatctccacccacactcacacatacactcacacgcaccttccccggcctcctctccacccacactcacacatacactcgcacacacctcccccggcctcgtctccacccacactcacacataaattctcacacacctcccccggcctcgtctccacccacactcacacatacgctcacacccacctgtcccagcctcctctccgctcagaacatattagctgtcttttcagcccaatcaacccactttttaagtccccagctggaaggggatggccatgatcagactgagaccttacatgccacgtctcagccctagagtttttatggcccagttttaaacctctgataatggaggtttatggtgccagtgcagacacggcctgggcaggggaacggtgagcggggctggagtggagacaggcagtgtgcagggcgagagcgagcgtgtcagtcccgccagcccatgactcacaggacgtgcagcattaggggaattatcagcgtcagccctgatgatttcctggccctcgtgtaaaaaccatcatatattttcctaatatctggtctcaatttcctctccaattaatggtatttccaacccataatacactgatttggctttccacttgtgctctctgaaagcacaaaagggtccacagacaccgactttctccatcacggggggctagagctgcccccaccttgcctttattgtttaaatcaccgctttatgaatcatcgatttctgattcttccagctacctgtggaagtgctagatgcactaagaagatgggaacaggaaggctcagtgtccccttctgaggggaaggcaggactccctaatccccagagcactgatttggtgcccaagagcagcccactggcgcaaggcagggcgctaaggtgatgatgtggctgagaagcatctccccgggcccgtgtcatcagaagagccaggctatcacacttcctctctagtgcaggtaccagaggaaactgtctaacgctggggccagagcacctagggaccagcaggggacataatttataggaagaaagcctgctcttcactgctgcagagctaccctgttgggttaagcattgccctactggttctgctttttaaagttccagagaagacccaggctgaccgttctggcacctggctgaggctgagtgcagggcagggtgggtgggtccctcggcagtgggaggacaggacagcaggagtaatgagactgcctgctcagacggcatctgccactcacagagactcagcctcctggcccacaggtgttggatccagcccgtcactggagcgatggagaaactgaggcctgtgggcctggggtcaaggccagagttggccaccacagggagtgatctggctaatccaggcccccccagctgccttcttcaggggtcacccaatccgcagagctgtgggccaagagacacctcctccaaggaagccctccagaccaccctttcagcaagccctgctgtcatggcctggcctggccacgtccttctagaccaggggtcacagacaaactgaagcaagccaggtccagcccagggaggtgtcgtttttgtcatgtgttttatttttaatttttggaattcagttttagaattagatttttacacacacactagattttcatcgtcccttgaaccattggagacccatgttcctgcaggaagcagggagacatctggctggaatgaggtggcagctgtgaccctgaccctcccaacccccaccacatatatatatacacacacacacacacacacacactcacacacagctcctggaatgtgactttttatgctgtggaaatgctcaacatgaccctgtgcatgattctgagctccaagagcagacgtcggtactgcaagcccgccctgccctgccagccttggtaagggaccccccagcactcagaggtgaccagtctttgacccctggctccaggaggagacagctggcctgttgctcaccctactgccaggctattctggaggtggcacagtgcccagcttcccacagacccatccctggggaccatgtttcctgagacccctgctctcccacccagaagcccagagcccagaaaaagaatgagggccacgaggccatggagagatccatgatccatctccttccctccctccctgacactcagcgtccactacacacttcggctttgcctcgtgaatgcctatgtgcaaaccaggcaggacacgggcacgtgctgccaatccaggaggtggcatgacatttctcatgtgcctagggagacatgaactggggagaatgggtcacagatgtccacccagaaaatcagaggctccactctacctggaaccccaatcctcctcactccaggcccagacctctggctctttgcagggactacctgtcacctgagaaatgtttctgagagaagtgatgccagatataaaagtatataagtgtatgcatgtgtgtgtgtgtgtgcatgcatgtgtgtgtgtgtgtgtgtgtacttttcctcagaagagggataatttgttggaaagtacagattcaaaataaagttctaaatatattagccagtcaaaaatcctggtagaaagcatttccttcctttcctatgtatggagcatttaggtttggagacatctcaaactccagcaccctcgcagaggtcagtcaagtggcagaaatgacaggagaggcagatgcagggcaagagggaggaatgaggtttgtgtcctcatgggactgcactcatcaagataaaatcccatgatgacacccagccagtcagggtgatggtgacaggccgttcatgtggcatatgttaccagcaccccctgacatggtttagctgtgtccccatccaaatctcattttgaactgtaactcaacaattcccatgtgtcatgggaggaacccggtgggaggtgattgaattatggtggtgggtctttcctgtgctgttctcgtgatagtgaatgagtctcatgagatctgatggttttaaaaaggggagtttcccttcacaagctctcttctcttgtctgccaccatgtgagatgtgcctttcatcttccaccatgattatgaggtctccccagccatgtggaactataagcccaataaacctctttcttttgtaaattgcccagtctcgggtatgtctttatcagcagcatgaaaacagactaatactcccccttactttatgagaaatgtacctactctggaggatgtaaactcagcatgttcctaggagaatgatttgtgaggataacatcttatggtgatgggaaaaggcattaaacaactgtgccacacagcctaggggagctgcccaaacacagaagggccaatgcagctccagagccaccggtctgggagccctggaatgggcttgatgtcctgttccactttgccccagggaccttggctagactcaagtcacctgattctgattgctgaactccatccccagccccaaccaggcaaggcagtgggtcctgaggggaagtcagagcaagccaggttggaagagggctatgccagacccaaaggaggatggggggcatggcaggcagtaattgttgcagtgtctcagaggggtcctaattgtggcttcccagaaagcaggcatacttgtcagggagctgggagatggcagagactcagccatggtttaaagccagaagccagagcaagggtggaggcagggcaacacttccaccgtctcttcccacttggtgctcacacctgagaagccaaggaccaagaagagtgcagagcttggggcaggccctgccctccctgcctagccagcacgtcctcctggtctccctgtgcacctaaccaccctctatatgacccatggccatctgtctcaatctgttcaggctattataacaaaatcccatatactgggtggcttaaacaacacctttttttctcacagttctggagactgggaagtccaagaccaaggcagagtcggtgtcttgagagggccctcttgctgattcatagatggccgtctcctcactgtgtcctcacatggtagaagagatgatggagctctctgagatctcttttataaggccactaatcccattcatgagaactccacactcatgacctgatcaaataccccatctcctaaaacaaatgccccacctcctaaaaccaaatgccccgcttcctaaagccatcaccttaggggttaggatttcagcatatacatttagggggagggacagaagaatgtagtccacagcctcatgtaagagggagcaatcatgagtcactgttctgcctagaaccctccaacgtgcccttgaatcctggtgtttgcagcactccaggcaccccctgcccacgacaggcacccagtgcagcctggctctccaaaacaccactgggcccctctacccactctctgcagcatctggggactgaggatcagccctcccaaatcagccaagaagatgtcctaccctcctgcctgcctttccctatcaccccagcctgctccccaagggaatgctttgaagcttaaaaggtactctcctctctgcctttaagaagagctttgaggcctgagctgccaccagaagttgctggcttgggtcttggggcatttgggaagctgtgcccctcactgtgcctacctcactctcagctccagccacactggcctccttggagtgcctctgaaaggccagaatccctcctgccgagaatcttggcacaacttgtactccacagcccccgatcctcttgcttgctcatggttctcagtcaggggatactggatgatgtctggaggcattcttgttgtcacacctgggggaatactattggcatctagagtgtggaggccagggatactataaacatcttacaatgcaagggcagcccccacaacaaagaatcattcagccccaaaagccaggagtgctgaagccaagaaaccctgtcccaggcccacgttctccaaggctgccttctagatcccagcaacaagcctgtctgtccccactccactttgcagccccacaaccagccaccccatctcacctggccacctgcacagtgggtggacactgaggactggagacacagacaaagcttcacaagggaagctcagcagctgccctggaaaggtctgaagtgggacacagtgggaggcagtgacagagacctggaggcagaaccaggcacctctggacagctagaaagggtcctggtgagggtggggaggatttggggagcctgacaaaggttcagacacccacacagccctcccccgacatgcaacagtgacagccgccagggcagagaagatgctcagagagaagatgctcagagagggaacagaacacaggcttgggctcccccaagatgcagacctgctgcctacctctgccttccacctgttctttaactctccaggcaaaggctcagctccccagggagccttctggcataaagaaatatatccattgaagaaaagaaaaaggaggaggaaaggagggagcaagaatgtcaccacctctaacctaccattttctacatgctttcatctttctgcttaattcagtgagtgtttgtggaacatctactataggcaattctctttgctaggtgttttggagggagatggccatgagaagaggagaaattaagtcagcttcatggtcagagacatttcctaaaggagatactacattgctgttgctgctgctgctgctgctgttgtttgttgttgttgttgttgttgttgttgttgttgttgttgttgttgttgtttagatcaggggtcccgaacccctgggccatggactggtaccagtctgtgaccacccgtggcctattgggaattgggccacacagtgagtgagcaaagcatcatctgtgtttacagccattccccatcgctggcattactgcctgagctccccctcctgtcagattagtggtggcattagatgctcataacagcgtgagccctattgtgaactgcacacacgagggatctaggttgcacactctttatgaaaatctaatgcctgatgatctgccactgtctcccatcaccccaagatgggaccgtctagttgcaggaaaacaagctcagggctcccactgattctacatgatggtaaattgtgtaattatttcattatatgttgcaaagtaataataacagaaataaagtgcacaataaatgtaatgcacttgaatcatccccaaaccatccccctcccctggtctgtggaaaaactgtcttccatgaaaccggtccccagtgccaaatagattagggaccactggtgtagattatctctgtgtcttacactgttctaagtgcatcacatttgttaactcattctatcctttcaacaaccctaatagtgggtactactattattctcattttacacataagaaaacagaagcacagagaaggtaagtgactttcccaaggtcacgcagctgttgagtggtggaacctggatttggactgaggcactctgtctggttccagagcccaggcccctcccaccatgccctgctgacccttagaatctggcatttgagctttatcttgaaggatggttaggattgtacagatggagcccagtttgccagagagagaaagagagtgagaatgcagagagcagagccggtgtaggtaagggtttccagatgggaaagtgaactgtggttacaccagaggcggaggcagaggactgagctctcttggggagtagcgaagacctgtcctgcttgcgctgtcggtaatgaggctctctgggctcagggctgattataaactctacatacaagaccccattctcccatccctggtttaccagtggttcctgccaccagtaacggtcacacggtcacagcagtgacacattacatgcaagtgctctgcccagttcctcccctgaatcctcacaacagctcagccatgtgggtgctgtacaagcaaggaaactgaggctcaggcaggaagaaacatgtccccatcacacagctagtgcaacgcttggccagggcacttgccttgtcctcccaggttgcagagcctggtgctcccaagtttgctgctgaaccttcctctatcctccccaccaccaaggtctcccctctcctcactccttccccccaaccgccccctgcctgtgcccactccaccccccagagcacacgcagcctggcgactgctcacacagcctctcacaggcttaatagctccagcctgtagaaatggaacaaactgatggccatgtgcatcacttttatgtgcttataagagagtcataattaatttcccaaatgcacacaggactcaggggatagacagaatgctattcacagattgcacgatcgtttgacagttttaggcaaatgaggagcgagtattatttgcttttctaacgactgcctggtgcattttggtcttgatgatggcatttccaaagcaatttcagaaacagattagagaagtaacatttttaatctttagcaaaaacctaagatgtgagggagattgtaatgtctgttttttcagcacgatgttttctagcgttagggcaaaatgtagcacaaaatgaaacaacatcacttactgtgtaaacagttacattatctccaattactcttcagctatgcactaccccacccctctcaaaagaacaaaaaagagagcccccttatttccctgttccaggggcctgaatcatcactgcagctgccctgaagaccataacccaccaggaacagggaaaaccccctacccgactctcgccgcctgaattccactgttagaatgcacttctccagcaatgcaaatcctccaggaacagtggtcactttcctgcaaaaaataccagcacttaacttggtggaaaaggaggaagaatccagaaaacagcctgaaagtacagaaaggggacacagtattagcatcatgggagggaaggacgggcaacgtggcgcaggggtagcaggtgcaggaatgacagttatcgggctgagggtgggcagagcagtaggagaggggaaggtgggaggtcagtgccacctccgacactgctgggctgcgctcactccctcccttggcattccccatccagccaacagcagcacctgcatctccaccaaagggcagtctctggtcacagggacacactaggtcagcggcctgagcacaacacagcaatggggcgctggagtgcacatctccaggagcagccctcagcacgtgatgagtgggagctggaggacaacacacagcttcctggccctgcaggtggaaacactccccagtgtgtgccaccccatctcccgggctgcccaggggctgagcctcagtggcctcagtggtgtcaatggcccacggcagtaacctgcttatcggcttctttcccttctctgtctcacttctcgtctcctctccctatgcttcctggaatcagctcccaagccaactccctgcaccgaaagtttcatcctggggtggagggcagcttcagcagaagacagcccctctcactggcccatcttgggtcacatgccatccctaggccaaatgccatgtccagagaggtagagcatggataggccagacctgggccccatgcctgccctggaccaagggatggggtcagacccacccgaaacacacagatgagtggaggaggggagttcccggggaaaggtcagggcctgttcccagaagagagaattctatggccagcaggctgagcagatgtcgacagcggcccgccatgagagggtccacacgggtcagcgaagcaccgtcttggagggcattcgggtggaattctagcagaggctgcactaagtcagtggttcagggcaccagaagtgagtgagctgggagtgaatgcctgtcccccgccgcccgccgtcaggggttacttggtgctggggctgaggggcagagccacgggaagtccaccccactatcccacagcacaactggctctgcctcaggaggctgggtggcttcctcgccccacccaagcttccatccaggcttagagatccatggtagggggcttgctacaccccaacttccggctcagtgtttctgtatcccaggctggaatgagggagcccacggagatggagagtgagctccctgagggatgatggtggcatctttctccaagggtcccacatcatctgatataggacagaacccgcagggtctcagagatgccattgtttatataacttgaccctcccagatgccaggagccctggggaagcctttcccaaaacgtatgcctcggagctcctagtttgacaaactggtatgtcctgatatggtgtgagtgtgtgtcccctccaaatctcatgttgaaatgtggcctccagtgttgcaggtgaggcctggtgggaggcgcttgggtcatggggcagatctcttatgaatggcttgggccaacccctcagtgatgagtgagctgtcgctctgagttcacatgagatctggttgtttaaagcgtgtggcatctccccttgctctctctggctccctctctcaccatgagagactcctgctccccctccacctcccgccatgagtaaaagcttcctgaggcctcaccagaagtcagatgctggcaccatccttctcgtccagcctgcggaactgcgagccaaataaacctcttttctttataaactgcccagtctcaggtgttcctttatagcaacacaagacaacacaagaatggctgaatacagttcccatacagggctgggttgggcaaaaggggatggtgtgattctcccattaagaaaaagtgggacagggtggattgaatcaagttgaacaggtgtctatggcagggcctctcagggtcttcattgcatgatattgctatgacttgccagaaagagccatcacatgcggcgtttcccagactttgctcagaaagtctcagaagtgtgggtcaaggatcctcatgtcggaaaatgctaaaccagcaaggccagtgcccattccctaggagcagccaggccacaggtcccattccagacactctgccaaacagccccacctaggttcctcacacacacctgccaccacccacccccaaatctaacatgaagtacaaccaagctaagccagcaaagtccagtgcagcttgttaagccactccaggctagacacagcaaagcctcgtgttgtcattgtgctgaataggtcttcagactttccagtatacagtgtgacaataatgaagagacttctgtggctgagtgtggggtcctcataaccctgaatgcattttcatgtcagtgatggtcagtggtaaacatctcctgccattagctggatgagacaccttattacaaaaattgcagcagaatcttcattgttttctatttccactattacaaaattcattttaagagatgtttgtctttctttttgctttttgatgtgcagcacagttgtctaatagctcatctcatctctgataagacgtcatcctcacgtaatcattcttccaggatcctgctggttttacatcctcttacagtaggtacatttctcgcaaattaagtgccggtaatatatgtctacctgtctagtggtgtcaccataaacagcctgtaaccgtcgccccaacactccccagggacacactaaactgactgtatgtcaccatggtgttttgtcttgatgagtacacattttaaaagtccatgtcctagcaagaagaggactaaacatagagactttccccctcgaggcaacataccctgtgaaaatctgctcagcgatgtttgaatatctcattgaggctcccacatttgcagctcaaggctagatgctgctttacctcttctgaatcagatggaagaggctgagtttggtccctttggaacccaagtgaagataatcactcagccctgcaaataagcagagaatttaccagcccacagccatgttcaccagcctgcttccgtcactcatgcgtacaagatactttgccatttgaacaactcttttgtatctagtatttaattttatcctcatcatgggtctgtggtatagaggagaaaacccacattcagggacgggtaagttttgctcaagggcgtgaggtgcaagcagcagtaggagagacagaattctcgggcagtgttcttccacttcctctccacttcctcacgtgtccttgatgaaaaatcaagctgggctctgggacgggtgagacagagttgggtctgcgggaggactttcccagcagtgagtggggcctaggggcttggaggcagccacatcacgatgtggatccagacaggggcgccccctctctcccctcacacctctctccctctctctctctttctgtctctctgtctgtgtgtgtgcacacgcacatgcatgcacgcgtgcatgtgtgtctgtctcctaaattgctaaatcgtctttctctgcttttccaaatctcccatctgattatccctcttttcttctcccaacctctccctaggagccaaatgaaggtgacagtaagctcaagcccagcctgtcctggcctagcctgagggcctctgctaaggtggaccccaaccagctccagcccagtgaccccaaggaagactctacctgcccagccaaacctaggccaccagtcaccccacccaggccagctcagtaccgcctccacaaagctcccgtgatgccctctccagggcagtggcacctccttccagtcctctctgcctctgtttcccacccacccccctacatccccctctgacctgggcactccatgggacagcttgcatgtcactcccctctcacagagctgggtgcagagaagaacatggtgggcgcctttgctgagcaagaacaatgggttgcaccgtgcagcctcacccacctcacccacatccccagccccaggtgccacggtagggactgaagcgttgacagccttaccaccaggcacagccagctcccagccaggcacagtccctgccccagaatccatggagggcagctcccttcccatgcccctcctatcattccaggacgttaaaaggcacaggtgactctgagccctgcttcctgctgtgtgctgcaaatcagttgatccaggaggcttgtcatgcccccatccctctctccaaagagaaaagaaacctctctgccctgggggcagccagatacctctacaaggcccagacaaggggagctgaggtcaggctcaaacacctggggcctgcagcatatcatgaactgcacagcgtctgcccactctaggccctctccatcggcacacgattcagacccagagctggtggcacatgtgccccccgacccatctgcaagggctgctccaagtcctgcagaccatttagccacacctcagccagtttctcaaaatccttctgggcatagcgggggctcagcactctctgcagggcacagacccacccagagccagtccttcctgaacccgggctgacggccctctgcctccaccaccccaatcgcagggctctgccatgcttgctttctggcctgcagaattcccagttccagcagcaggggctccttctccctctccccagtttgggagaccccagagtaaggaaggaggtcttacggtctggcccatgccactcccagcagtcacgttgtttagggtgtcaaggatcctggttggctttgaagccaggcaaacctgagtgtgaattctccctttcagctacatgaccttgggcaagccctctccccatgaatctcagtcaccccatctgtaaaatggtcagagtatctacttcctgacctcgctagaaatcgaggtaccactggcaagtgtcaggcccacaggaggggctcacaagggccagctccctgtccagcctcctcaaagcagcctctttctccttctccagggtcagggccactgccctgagtgtggacctgctcttgtccttgcagctcagcccttgtaccacccaaccccaagccatgctcagtgctgggtgatgtaattgtcctggaggaggggcactgatccagccacgcactcacccccatctgagccacgttagaagcactgcccataggggtccttaaagaagtgacctagagtctctaattagcaccaaactcccattttcaccctaatgagcttccagcaccacaccaacccaccacattgcagtgtgagaggagacctttggatgctgtcggtccaagccctttccccatgcccgggctgcttttctggcttcatcactagcccagcccctgccctaagcccgtcctctgccataccaggctccctgtcatgtgctgtgctgctcctcaccttcacacctgtgattgtgctgagccctgtgtgtagaatgcccttcccttccctcgccccctggtgagtcctcgtcactccttttcatcctgtccaatagggagccataagtcacatgtgatgagtgagcagttgaaacgtggccaatacaaattaaggcttgctgtttatgtagaacgtccatcagacttcaaaggctgaagacagaacaaagaatgtgaactatctcattcataaatgttttgcaagccgggcacggtggctcacacctgtagtcccagcacttgggaggcagaggtgggcgactcagccaaggtcaagagttcaagaccagccttgccaacatagtgaaaccctatctctactaaaaatacaaaaattagcccggtatggtggtgcgtgcctgtaatcccagctactcgggaggctgaggcacaagaatcgcttgaacccggcaggtggaggttgcagtgagccaagatctcaccactgtactccagcctgggagacagagtgagactctgtctcaaaaaaaaaattaattaattaattaattaatgctttgtagccaggcacagtgttcatgcctgcagtcccaatgctttaggaggccaaggcaggggggtttcttgaggccagaagtttgccccacctgggcaacacggcaagactccaccactgaaaaaagtttaaaaatgatccagatgtggcagggcacacctgtagtcttagctactcaggaagctgatgtgggaggatcccttgagcccaggtgttcgaggctacagtgagccatgattgtgccacagcactccagcctggcaacagagcaagatcctgtcttttaaaataagaagaagaattttgtgctgattatacagtaaaataacattttttgctatattgggttaaggaaaatttcacctgtttctttctaacacagctactagaaaaggtaaaatcccacatgccatcggctgtatatttctactgattagtgctgccctagaaggccccactttaatatggtaagaaatggctctagagccctcagcaaggctggaccacgtgtacctgtggatcccactaggaatttggtcttcatgcagctgtaagccattggagggtgtctggggcacagaggctctcacagctcctggagtacaacagtcaagaaggaagatgaggctcctccctgccacagctaatgttctagtggagaaatcagacaactaactaagcaaatgagggaagcgatgtcagcccccagtcaaaggtcatgaagaacgaacctgggtgatgtggaacggagtgactggggaaccccttcactggggtgttcactggtggccctgctcttgtccctcagggacaagaggtcctctcagaggaagcggcatttaagctgagactaaatgaagacctggagccaactaaccaaaaagctgcacagagaagcagcaaacgactgcctggcagggagccgggagtgagaagtggatgtattaggactcaggagtgttttggatcaaagctgacagagctgacggactggctgggaacaagaggaactgcccctgaccttggcaagggggtcatgtctcaggaggagcagacatccagggacgctggggatcttctcgttatctggccatcagggtacctaggctcctgtcctttgtccactgacttgtggtgactttgggcaaacctttctgccctctgagttctcatctctaaaattgatgaagaaccttgctgggctcccttgcagcagggtcctgagaacaaaataaagcaatgcctgtggatgctccattcattctgcaccctggcaggccccagtagggctggggtggtagaaatgagcactggattgaaacgctggtttgtgggtctgaatggaaaccatgcacagcgcacaatgtggggtaagagaagagcttgaacaacagtactaggggggcctcctgaaaacagggcttctcacctgggcctagatgcctactcattgtcaagcagaaacgagaagaagatagcacaacgagaggcagtcacgacacacgcaaaaacatggagatgggatacggcaaacgtggaaaacagaccacagggcactcaccggcctcagtgaaacgcccagggagaaatgccatctacccaacctatgtgaccgccaggaaatcacagatgcatcctgggaagagcctctttcattgcccaagatggccccagactggccccaacactctccaagacagcgccaacagcttgtcggtaagggcagacagcaccaaacatgtagacgagaaatgtaaaatgagtaaacattattgaaaggggctgtgtaatgccatgaatttttcagtggtaaaaacagctgagaagttattaaaaaatgcatgactttcatatttgattataagtcaagagcggccaaaaagagagggggagagagcgcagggggtggaggaggggggatggcaaaagacaccagcagcccggcagactggaattaatgaggttgttcctaacagggaagaagtgacatggtgattagttaattactattcagccgcctgtaattaatgcacaactgaaattggtgtacaatgaattaaactaccacataaagctgctacccaaattgagccgaggaggctattactgcggcttcaccattgtgatttcaatagtgtctccctccgacaacgtgttatgcaactagtgggagagtggggctggagagatggagggcctgaggtagcgcgtgatcctgatgctcacactcagaggggcctcccgctggctctgactagtgtagggtctgggccccagcaaccagcccagggcctggtccggagaaagttctcaatgagtgtaaagaggtggagtggggatgactcgggaggcacgacagatgaatgggaatggagaagggaaggagaccggaccgctgctaagaaggaagataatcatctgtttacatcttttctctgaagataggcactgctgttatctcaggctccatgtcactcatgtcctccaccccaggaccactgcaaccaggacagtctactgcaccagtccaggcaccaggtaccccttccaacacattctgcacacagcagccttttacatcaagtcatgtcactccactgcttaaaacccacctgtggatttctactgtaatgagaagaccatttactctccctgccatgcacctacaaggcctggtgcaacctgctcccgacacctccccacctcacctctccctcacccctttaattagatgacccagccatgccatattggtctttctgtgccacaaaatctccaagttcaattccgccccaggacctttgcatgtgctgttccatctgattgaaactctccagcttttccaagggatgagacctcagctcaaatgtcaccttctgagaaaggcctgccctggcttccctgtctaaactagtccctcccctgtcaccattattctctcacatgaccctgagtctgtccttcctggtctacccgaagacaggggttgttatctccaggtatgctggatcttgctcatgctccatttctcatcacaacacaggctctatacaggagaaaagcatctgttctctccaagtgtacccagggtcctgcgactaattggaatgagaagagacaggcaggaaggaccccttggaagcccctttgtaggtgatggggcttgtggctcaggtctagagctgctggagaagttctgggactacctattgtcatatgctgtcattccccctcaccccaacaaatggatcccaagaagtagtaggctgagagtgtggcagaaaccatctggtataagtaagtgactgtggtggtcagagactggcaaacacccacacaggctttacaaccaggtggtctcagtctctgcccgggctgtgatggtggtctcctccacacccagagacactgcttcccttgggccttcctccccatcctccagatcctgggacactaaagtccacgtgcctcatcccatctcaggtggtgctgttgcctgtattgggccacctctgggccagtcacagggccagaaggatgaacgctctgattggctaggcctggggacctgcccacagggaggtggaagagtccaggcccctccaaaccacagcagctgagagagagggagggaaggagagagggggatgggggggagggagagagagagacggagggagagagacagagagggagagagagagagggagggagagagacagagagggagagagggagggagagggagggagagcgggacagacagggagagggaaggagggagaatgagagagggagggggagggagagagacagggagggatgggaggggagagggagagagggagggtgggagagaaagggaggggaagagagggagagaaggaggggagaaggggagggagagggggagggagagacagagggagggagggggaagagagaggagggatgggggagagagagagagagggagggaaggaaagaaaagagggaaggagagagggagggcgataaagggagggagaagggaagggaaggagagagagggagggagagggagggagaggtgaagggagaaagacagagaggaaagaagaaagggagaaagatgtagggagagagagaagaagggagagagagagggagacagggagggaaggagaaggggaaggagggaggggagagatggagggaggcaggagagagagagggaggcatggacaggagagagggagggagggagagagagagggaggggagaaacagggagagggagagagagtgggaaggagagggggagagagggagggagagagggagggaggggggagagagggaggcagggatggaggaaggggagagagggaaggagagagagagagggagagagaggaagagagaaagagggggagagagagagatggagggagagagaaggagaggggataatgggagggagagggggaggagaggaaaagaggggaggggggtgatgggagggagaaagggggtgagggagagagggaggggaggggagagagaggaagggagagagggagggaggggaagcatcaaaggagaaaggaacagaaacaatagatgcccactgccttagcggtgacagacccagaattatcatggaccagcttaacttcaaaatgcaaaattttatttccctttctctttagtcttgagatataaccttggaacaaactgcagaggccttttcccttaacctcaaaatagactccaggttggtccctttcccactgtagattcacatcacatttaccaaactgcatgctagtatctagtttggtgcttacttgggagttccccgggctaatctggagacaggtgtaccaagcctgtagacccagctgcagcatcccagtggttagctcaaggtgactagtcaacaccagccattgtttagatgatgccagcccatgctccaggtagacagagacccaatgagaggtgacaacgtgctggtggccctcgcttgctctcagcacctcctcagcctcgtgtctgctctggccatgcttgaggagcccttcagcctgccgctgcactgtgggagcccctctctgggctggttgaggccggagccagttagctttccgggaggtgaggagggagaggcgcaggtgggaagtgcgggaactggggctgcgcggctctcgggggccagcgtgagttccaggtgggcttgggcctggtgggcccgcactctgagcggccggccagcgccacccgccctgggcagtgaagtgcttagcacccgggccagcagctgcagagggggccccggatcccccagcactgttggcctgccggcgccacgctcaaattcttgccaggcttcagccgcctccccagggggcagggcttgggacctgcagcccaccatgcccgagccccgtgcggtgggctgccgcgtgactggagcctccctgacagacactgacccctgctccgtggcaccagtcccatctaccacccaagggctgaggagtgcaggtactctgcacaagactggcaggcagctccaccctcgctcggccccagcgcaggatccactaggcaaagctagctgggctcctgagtccagtggggacttggagaacttttatgtctagccggaggattgtatatgcaccaatcagcactctggcactctgtgtctagctggggttttgtggatgctccaatcagcactctgtatctagctaatccggtggggacttggagaacttttatgtctaactagaggattgtaaatgcaccaatcagcactctgtgtctagctgaaggtttgtaaatgcatcaatcagcaccctgtgtctagctcaaggtttgtaaatgcaccaatcagtgctctgtgtctagctaatctagtggggacttggagaacttttgtctagctagaggactgtaaatgcaccaatcagcactctgtgtctagctcagggattgtaaatacaccaatcagcaccctgtcaaaatggaccaatcagctctctgtaaaatggaccaatcagctctctgtaaaatggaccaatcagcaggatgtgggtggggtcagataagggaataaaagcaggctgcccgaggcagcagcggtaacctgctcactccagtcttttcccacactgtgaaagctttgttctttggctctttgcagtaaatcttgctgctgctcagtctttgggtttccactgcttttatgagctggaacactcacttcaaaagtctgcagttctactcttgaagccagccagaccactaacccaccagaagaaagaaattgtgaaaccgtccaaacgtcagaaggaacaaactctggacgcactgtctttaagaactgtaacactcaccacgagggtccatggctttgttcttgaagtcagtgagaccaagaacccaccaattacaccaagatagccaccaaaacaagacacacagaccttgcacccaggtcagcccctgcatgcctcccatgtcaggtttccctgtacaaatccttgccttctccccagaaatttgaagtggcgggctttggatgggaatccagccacttcccctttgctggttttggttaataaaagtcacttgcttactaacagaccccacccttgtcaagtgggctctgcaagcataaggggttagacctgcattccattacagaattgtttgcagggagtgagggaaggatagagctcatgagagacaggtcccctacagagcctggggtgctgtgtccttgatgaggaacggaagtcttgggtttgagtcccagccttccccacccacgatgattgcagcaagtcactcagcctctgtgcccactgggctggggctgtgggctcagctcgtaccaggggtcaccttgggcaccctcaggccaactgtgcccaggttcgcctttctgcatcagcaggcagagccactcatagcctccccccaaccctcatgcagagaaggaaggagccagctctattttccaaccaaatgctgcacatggacttctggagacatcccccatctcagtgcttggcccccatctcagaactgtaagagaaggcaagatcccaggacctgtcgggcagcagataaatgagcaggactgccaggcctccccgcctctactctggcattatgagaaggaagccatagctccctccccatcagccttaaagggaaataactgccgatcctaagcagaaacctcatggggtgggtggtggaggctttggaggtgtccacagtcctctcctgacttcagttctcccatctgtgaaatgggggcaagaattccggccacccgaggttatcctgaaatcacatttacctatggtgaggttacctatcccaccaagtgccccagtaactcgtggctgagagtgaaccagcccggggagggaagagtctcagggcctggtgcagggcaccccctggggaagcacggtgcccaccccccgtcccacaccaacctcgtttctgtcagtggctgccagggctctgcagagccagaacccatttcaggccagaatggtaacatttcccaagaaggagaaaattagattgtctctggatctgcctcctccaccccctccttccgaaagctccctggtgggcactgttgctctgcagggaggctgatccagactccacagacagttctcactgagcagcagcttaggcctgcagtacgtccctgcgtgatgaccgcgtggaaagcctgtgggcaaccagctgctggaggccccctgccttccctcccgcctctggaggggacctagaggccacactcctggaggagatgggattccttgccccacagattgaggactggggaccatgccctcatcctatctctgccgctaagctgctgtgcaaacttgaacacagctgttcacctctctgggtgccacattgggatgagccctggctcctgagcgagcagccccactgctgcctggaagtgaatgacccacgaacctgaaaggctctgggagctggccaagtgctgtcatcatagcccctgcccagtgggagggaatagatggtgacccccaagggacatgcagtggcccaaggacctggacgcacctgatatgaaggagaggaggagtcaatgccacagtgaggacctgggaggcaggcagactgggccaacctcgcccagcctgagagtggcctctgtgcaggaagcttccagttttctggagtacccaggccaggggtttaggacagagtcctctcatccctgcaggactgggtgccgtgggccacattgccagaatgccacattgccagactgaatcagaggctgcagtgagaggctcccagaggtccctcctggggagtggggaatgggctctctggaacgcccacgggctctcagaagagggctccaggggctcagagtgcgggggagttgcgggcatcctcaggggtgcagtggggagaggccacaggaccacagctgtgactcaaattgtattgtttgttattttttttagatataacatacctgcaatcaagtatctccagtgtctggctgaactaattttagcccaagaatccactgtgtaaccatcacccagatcaagacatagtgtatttccagcacccagaagtttccatcgggcctctctcccatcgctgacccaagtcactctcctgtcactgccaagctgaccactattctaacttctatcaccactgattaattttacctaattttgaactgcatttaaatggtgcttttttccccagcaaaatgtttttgagattctctgtgcagatgcacttatcagtaggttttcttttctgttttatttgctaagtcatatttcattgcatggttgtacccaattggtttagcctgctaatatgcactagatggttttcctattgggggtattatgaataaagctgctgtgaactcttgtttctgtcttcggtacacatagccattattccctgggtatatacctgggagtgccgtcaatgaggcataaggtgtatatgtgttcagctttgggaggaaacgccaaacagttttccaaaatggttgtgccacttctcatttccacttggaatgtcccaggtgcttcgtgtccccaccaatacttggtattgttcgtcttttattttagctgttctgataggcaatattttactgtggccttattttgcctttccctggtgattaatgatgtggaacttttttttaactagtggttgaccatttcttcattttcttttgtgaagtgcctgttcaagtcgtctgcccattttcttatagagtcccctatcctttctttgatttataggcattctttatatattgcagataccaacttctttatcaagtatatgtattttgaacatctcccagtctacggcttgctatttctctctgttttcctccttccttccctctttcttccttccttccttcccaccctcccccctccctccctccctccctgtctctctctctctctctctttctttctttaatttcaattttcattttagatgcaaggggtaccagtacaggcttttcacttgggtatattatgcgatgctgaggtttaggggatggttgattgcatcacccaggtggtgaacaagattcccgatgagtagtttttcagcccttgcctcccaccctctcctgcccctagtagttcctagtgtctacttttgtcatctttatgtccatgcttttccctctgtttatggtgtcctttgaagaacagaagctgctagttttaaggaagttaatggatcttttcttctatggctggtgctgtctgtttcctgtttaagggaatctttatgtttcccaagatgtgacctgcaatgtattccattcagtcagcaccgactgggcaaatcacctaccaggtgtttctgggctcgtccccaaacttccatgggtgaagaagtgtgctgctctgctcacattttgctctgaggaccctgctgagtgcagagtgggaaggcgaggcacagggtgaagtcccattatgaacaagcctgcagatgtgtgggaggtgaatcaagggggtcttgacaatgcctgtctacacgaatggttttggttttgttctttgttctttttagagacagggtctcattctgttgccaaggctggcgtgcaggggtatagtcataggtccctgcagcctctaactcctgggctcaagtgatcctcctgcctcagcctcctgagtagctaggactacagccaccatgcccagctaattttattttatttttctattttttgcagagacagggcctccttatgtttccaagactagccttgaactcctggcctcaagggatcctcgtacctcagcctccagaagtactgggattatggacatggggttctaaaggttctacagcaaatgacttgacttcccagtgttctggagtgctgtgttggttctctcccatccctacttctctccactctttgggaaggaggtggaagctgagaagaggctcctagagacagcaaatgtccaggttctgtgcagagttcctgagtcagcagatgtgggttagaggcttccagctctgccactcgccaaccttcttatgcctcagtctcctcacctttaacatgaggatagtaacagggtctaccttgcagggtcactggaggaagtaaacgggacaatgcatgtgaggtgcatacagtcggtgctcaataaatggtgggcaattttatttaccagacaacaagtggaataaggtctcaggtgcccttcagttttaaatggccatctgttgtcttgataagggctcgttttttttttgtttctggttctgtttgtttgttgttttgttttgtttgagacagggtctcactctgtcacccaggctggagtgcaatggcaggattttggctcactgcaacctctgcctcctgagttcaggcaattctcccaccccaacctcccaagtagctgggagtacaggcatgggctaccacatccggctaatttttgtatttttagtggagacagggtttcaccatgttggccaggctggtttgttgtgttgtgttttgttttgttttgtttttgagagggaatcttgctctgtagcccaggctggagtacagtggtgtgatcttgactcactgcaacctctacctcccagattcacgtgattctcctgcctccgcctcccgactaggtgattacaggcatgtgccaccatgcctggctaatttttgtattcttagtagagacagggtttcaccagtgttggccaggctggtctcaaactcccaacgtcggatgatctgcctgcctcagcctcccaaagtgctgggattagaggtgtgagccactgctcctggcctgagggttcagcttttccttgcaggaggcctccaaccaagctccttgcatccatcttgcagttctgtgtgaatgtctaggaggcctgaatggtacagagcaacaagccccagcaacctcacctctgggctcctgctctagcctgctccccatggcttatcattaaagtaccaagagcagatgatggctccactcctcccactccagagctcccagctgtcaggccatcctgctcccagacagccgtttctgtcctgtccctccccaggcagtggctctgtcctcccatatacttgttctgtttcacgggtggctcctgctgcctgctggcagccatttcagccagcgagtttatccaatataataaaacagctaccaccccaaggatgtgtcagaagagcaaatgcatgtatgtcctttagatttcagagagctccttaattaattggccaaccccaagaggcggctgcccagggcctggggccatgtcagagaatcacagcccaccctgtccacagcacagagactgggctctcctggcaggggcgcttgcttgtcacagtagcattcaatcgatgtgcgtggaatgaatggattaactaacgacaagagcccagctgtcctggattcatgcattcacgcatgtattcattcagtttccactcaacaagcattacggagcactactgttttcaataaatgttgtgaccagaactgaagaattcctttagcaaaacacagaatccctcctgtagttgatagtaggggtcagtggggtgtgaagtggcagtgtttcacctgcccaagggatgcctcttctcctcttctcaacagccccatgaactaacagtccacagccatgatgagaagtttctctgttttctggtccctacacagcctgttctggcttcactgaacacattttctgaatctctactgtggacacctaaaaataacagcctagtgcatccctgagtctgaggctccatccctgttgatggcgcctcctgcttcaggcttgaaagaatggacctgtctctggagcaggtagccttgggaaggaggaaccaagcctccaggcttggcccaggagggaagacgagcaaagctccctgccccagtccctcactgtgcacaaggacccagagacaggctttctgagaagcatttttcccacggctcctgggatctcactcacatgcgctcgcgctcgctctctctctctctctctctctctctctctctctctctctccctctctctctctctctctctctctctctctctctctccccctctccccttctaaccctctggctgcctttcccagcctcagctgaagcagtgactgagtgttagacttggaacaatagcagatgctccccagctggcatgctctgttctcttgggttccatcgtcccctggctggcatttcagaatctcccaatgttagatgaccgaagatgggatatggccagatcctgtcctgggattcaaatggttctgtcagggacaatgctggtgttgaccacctcctggaatactgcaggattctttcagagcaacagccaaatgaagacagccgtgggatcaagccttctgtactaattgtgatgtcactgggaagtgggcttcccctgtggacactggattgctattggacctgagttttcaaggttctggccaacctgggcagctaaggaagctccctgacacagcaaaccatggctgcagtacacaagtgtgctacagcccaatcctggacatatggtcgttaccaaaaccccagtcatcttcttgaaggagccttagtataggaaaccagaggtgacctagaatcttctatttgatcaagggatggctcattatctgacttagcaccagggattcatgctaagatgtattgtctcttgatatcagagtcaagacccaggtaagctggcccgtgaggcgtggttcccatcgccaggagacaacagccgcgctgaccagctgctggcaatttcttcggtcaccctgcctctcaacttccaaagccccatggttttcgggtttacccacatatgacccttatgtaaatttgcttgtcccaagaacccttaactcatatcgtgtctgtttcctgtgtggttggttattgatatagtttggataaaatgccttggtctttagtatagtttggatattgtcctctccaaatctcatgttaaaataaatgtgacctccaatgttggaggtgaggcctggtaggaggcatttggattattggggcagatccctcatgaatggcttggtgccctcctcgtggtcatgagtgacttctcgctctattagttcaggagtttaaaggagactggcacctccttctccctctctcgtcacatgatgtgcctgctccccctccactttccaccaagattagaaacttcctgaggcctctccagaagaagatgctggtgcctgcagaaccatacgccaaataatcctctttttaaaaataaattgcccagcctcagggattcctttatagcaatgccaaatggactaatacagtcactactatgtgcgttcataggcagaaggcattgcagggcaatgaacagagccattggttaaagatttgccaacacttcccagcacatgcttcctttaaacatctcgtgttgccaactaatgagaagaaatggtatccacaaataataccagcagtccgcacacctgaggagtaagtacttattcagaaagctttgctccaatgacagtgggaggaaaattggccaaagcaacagggactcccccaggtacagtgtgaagagcaagtttctccccagatatcctcagcaagaagatggcaggatccacagagagacaatgtccccttttgggcaaacaagagggaaggtgtgatcatcacgctgtgatctgaaaaccccacggtaagcacagtggaagtaatgacaccaaccactggcctttactgtgcactttgtctgtgtcgggcatgagactgagaattttgcctttattattctagttaatccttccatttacactgtgagactgttgctaccacttcctctattttacagtggaggaaattgagtctcagaaaggttaaggaatttgctcaaagttgcagaactagtaagtagcagaaggcagtttacacccaggtctgtctacttttacaatttatttggcccagtgtcctgcctgtgccaccctctgccatgtgcccccttgtccagaggccctggagctcaggtcaggggctcattcaagcctgccgcgtggggctgggccagaacatccctcagcaaagccatctttacacaagctcaaagaggccccgacccagatcttgagcggatctgggatctccgtgtccccatggctttcctgacatcttgaggtttcagtatctggacatgagcaaaagtgtcatctctctacctgcctaaagggaaagtctccattcaactgaagaatcttctcttctctcttcacttgattataaagaacacacttctgttaacttcaatatttgccttagccccacactctatttaaaagccaaacatggtgccgggtgcagtggctcatgcctataatcccagcacttcaggaggccaaggcaggaggatcacttgagaccaggagcccaagaccagcctgagcaacacggcgagaccccatctctacaaaaaattatttaaaattgaccaggctcggtggcacatgcctgtagttccagctactggggaggctgaggtgtgagggctcacttgagcccgggaattggaggctgcattgagctatgattgccccactgcactctagcctgggcaacagagcaagactctatctctaaaaaccaaagacgaaattgtgtttccagttctcctccaaggccatccaggccacacactggaccccaacagccttcctcccaatctctctctcaacacaggactgcaggttttggatttctagttgtggcacaagcattactctggccaaccctaaaataaggcccagcactgccttccctccatgaacacaggctgggtcccccagttgagagtctaccataatcaatctgtctacatgggaccgtcaggagagccgccaagagatcagaggtgtggaggcaaggacttagcctgcagggcccagctctatgactttgaggaaagctcccattactgcagacctgggtttattctgtaaaatgggggtgcttccagcctgccccagcgcccccaggcagtgagtcagggtgcttggcaagtgtttcactttgcagaaaatggtctcctctcctgtgggtgagaagtcccaccactgtgccaggcattccatcagcagcagttccaggaaaaccttcatgagtctcgttggaaaaattatgtatattagttacataggccccccctaattcaggtctgagagcgctctgtgggacttcagtcaatattggctgaaaatcaaatacagaccttgttatgattccatgcaaacactgcactgaattccaccaaagcatgctccaggcttgagagagaacattacattaacttgcacaactgtccatggggcaaaacacatgtcctgacccctctgccaattacaaggatgcgggctccacccaggcattctcataaattcaaggactccactatcgaggcagcaaatcagcaccaacacacttgaaaacaagcgggcatagatagagactgagaactgatgtaactgacttgattgagaatggacgcccaatattcaagtgaatgagtaagtgaatgagtgagtgagtgagtatgtgagtgaatggagagacagctaagtggaataaagaacatcagatatggagtcacaaaatctgaggtctaatcttgctctttcattcactgtaattttctagcttaccttctaagcctctgttttttcatctataaaataaagtgaagattatatatagtaaagattaagtgaaatgatccttgtaaagtgcttagcacagtgactggcatataggctctcaaaaaattataataaacaaccactcaataataatgacaaagccacataccaaaatgcacaattgagatttaggtaccttagaagcattggctacttttaaatgtagatatagaaaaagactgacccactcaggattgggttatatgtttctgtttggaggcatccctgcttcaaactcatgccagtatgaaaagcaaaatgtaattcaagaagttgtaaaatacatagccatcttcaaaaacaaacactgcaagaataagatatgatttgaaaacaaaaagtggcagaactccagtggctgaatccctgaagttcctattgtgaggagtggtgggactacgagtaacctctgggaggcaagggcataactgaaagccactgtgtgagcccaccggctgaagctgtcccctgaacatgggaaaggtagctgggaaaaagtatgacggactgtgagcgggtgaaaggggatgcactagatgattgccacatctaggatctgagcgatatcaaagaagtagaaagtctgatatctgtggaattcgttgggtgctgctaaatgttattgatacattgaagattaaaattacagactcaagtcagtcaattaccaatttaaggcatggatgataggcaaaaggcctccatgacaatgcttaaataaatcatccttcccatggtcagatagcagaccatccagaagatggaacctagaatctgagtgaaagagagcaacgcttcagagagaagtggggtcccatatgccaaaattaaggtcttgacaggacagaattgggaccctgaaatggggtagagacatctgggtggagagttgaaaacactaaacctccagattccctggaactctctctacctgcagaagtggtgggctattcctttgcgggagacagcaaatgcccttgcttgaaatctactcagaggcctcagtggtgacaatctcttgtaagactgtctttcctcctcaagatcttccttcaccatactctaccctcacccccactggccacaagaacaataaccagggtggagtctcagtaaggtctaactaggaaatactggccctcctaaagtaaaagaagggcgattgaacaaaaatgtctggccagtaatcaacacatcaaaaaatagatgttggcatggacgtggtgaacagggaacacttctacactactataaactagtacaaccactatggtgggaatgtaaactagtacaaccactatggaaaacagtatggagattccttaaaggactaaagtagaaccaccattttatccagcaattccactactgggaatatacccagaggaaaagaagtcattatgtgaaaaagataacttgcacatgcatgtttatagcagcacaatttgcaattgcaaaattgtgggaccagcccaaatgcccatcatggataaagaaactgtggtatagctatacaatggaatactactcagccataagaaggaatgaattaatggcattcgcagcaacctgaatgagattggagactattattctaagtgaagtacctcaggaatggaaaaccaaacatcgtatgttctcactcataagtggaagctaaactatgaggatgccaaggcattaagaatgacacaatggactttggggactcaaggggaaagggtgggaagaggtgagagataaaagactacaaattgggtgcagtgtatactgctcgggtgatgagtgcaccaaaatctcacaaatcaccactaaacagcttaactaacgtaatcaaacaccacctgtttcccaataacctatggacattaaaaattttaaaatttaaaaaatttttaaaaatacctggctgatatgaacccataggaatcaagagagcttgcctggaagtgggtcttaaggccactgaaccaagagtgggtatgaaaaagggcacagaatttgaggctggatgagaaattcaacacttggtcaaggtcctgggagtcagtcctagcaatttctgaatggttcttagtctcttgaagaaaaataccttaccataaataaaatgtggaggggatgtgaagaaagccttgctggagtgtcaggtaaggggttcagttcttgtgatcccagagaagtggccatgttaccatggatctgttacataagatctgagttctcatcatatgtttcctgagagaattcagaggaaacttccctcactgaggaggtgggaaggaactggggaaggaagaaagatggaaagaggggagactgaggaggcatcttaagctcagtagtatctatctgctctaagctatgctgataataggaagtcttgtcatggagtggagctttctagaatcaccaaggacaaaagggttctggaactgtggaggccatatagcagcacttaatcattagaggcaaggtagacactgaggtcaggatggcaaccaggggaatgttacctacagggatgtgtgatgaccatggtgtacttagtgactccatgtggctgacaaaggtattgatcaagaatggataaaaatgagcaaagaaaggagattaaacgtaccagtgggcagtaagttacatgtcagtcagttctcagacacaggacccatcaattgaaggagaggctctcttgagaaaagacactgcgatgccacaggaggtataaacaacagcagttacccctgttacaagtaattgtgccttggaaaagggaagaagtttatatcttcagtgtgctgttggatacagcatcagagctaacattcatacctgaaggctcaaaacacaaatgccctccaccccgcattaaggtgaaggtatgtgagtgcaagcagtgaatgcagtccagtctttctctcagtgggtcccgcaggtccacagacccaccaagtgggcatttcctccattccggaacacatcaccaggatggacatacctagcagctaacatagtaggaaaggccgaacgccagctcctgaaattgccccctgacccaagcaatcaaaactaataccacgggccaggcgcgggggctcacgcctgtaatcccaacactttgggaggccgaggcgggcgaatgacctgaggtcaggagttcgagaccagcatggccaacatggcgaaaccccgtctctactaaaagtaccaaaattagcagggtgtggtggcaggagcctataatcccagctactcaggaggctgaggcaggagaatcgcttgaacttgggaggcggaagttgcagtgagctgagatcataccattgcactccagcctgggtgacaagagcaagacttcatccaaaaaaacaaaaaaaactaataccacatctgggagtagaggtagaaatgagtgttattctcaaagacttaaaggacagattggcatggaattcccttatgtcctcccacttaattcataagtctggaacttgcaaaatccacatgaatcatggtggatgaggatggaccactcagacttaaccaagtgtaaccccagtcacagctactttgccagatatggtgtgtttacctagaacagatcaacacagcttctgctatgtagtaatgcagctattgatctactggacttgtttgaatcttcatcaaggagcataagaggcagtttcactcacacaggatgggtgagaatatacatccatagtcttctcctgtggctatgccagctctccttctatctgtcacagtacagcctaaggtgaccttgaacatctggacatttcacagaaaatcacatttctccacaatagtcttgcagaggttggaagacaaactctgcagggtccagattaagagaaggctctgcagcaggtccagaatatagtgcaagcagagctgacacttgggtcatacgattcagcagatcctatggtactagaaatatctgtggtagataaaggtgcagggtcaggtctctggaaagccccaacaggagagttatagtacagattcctgtggctttggagaaagccatgttgtctgctgcagtcaaatataccttatgcaaaaatctgctcccaaaatataaaagccacataaaacctgagcccctgaccatggaacatcaagtgactgcaaccagagctcttgtaccaagctgggtgctctttgaaccaacaagtcatgtattgggtggattaagcagtaattcatgtgtgggagttatacatccaggagcaagcacaagcaggttcaaaaacacaagcaagcaatacaaactgctggcccagaccctcatgtcacccacctatgtcatgccaatgcatctccctcagctcaccgtatggcctctttggggtgggagggggtgatctctacaaccagctgacaacggaggcaaaaaccaggatgagtctgccctgcatggcaatgcaagatgaaagtgaacttctactgcactgcagctgcactcaggggtggccctgagagtccaggcagtcatccactctccatctctcaattgcatggagagagaaatggcccgaaatacatatattcccaagcagtgtgaattatctgttttctgactgactagacagactctcaaaagagcaagattgaaagattgagaacaggctgggcacggtggctcacgcctgtaatcccagcactttgggagaccaaagcaggtggatcatgaggtcaagagatcgagaccatcctggccaacatggtgaaaccccatctctactaaaaatacaaaaaattagccaggcgtggtagcaggtgcctatagtcccagctactcgggaggctgaggcaggagaatggcgtgaacccgggaggtggagcttgcagtgagccaaggtcgcgccactgcactccagcctgggcaacagagcgagactccatctcaaaaaaaaaaaaagaaagaaagaaaagaaaagaaagaaagattgagaacaaggagattttggcaagcgtcatgtggctagaactatgcaagtcaagtgtgtggattttgggatcacacatcaatgcccaccacaagcagccacttcaagggaggcattagacaaccaggtacatgggagctcttactcagaggtgtccagcagcaccatcagccaccccgaatctgcccagtaaataaatgctcagccagtcagcagaaaccttcgatacagtgtcaccctccaggaaactaccaagacaagttaatgttgtgtcaagttaattatatacaacttcttctaccctggaaaaagtgattcatcctgaaaggaactaaaacatagttccagaatcgctttgccttttttgctcataatgtctcagccaggaccactatccaaggggcaagtacatgattggtcattggattgcacatggtatcaacttgcaccaaaagacccactttatgacaaaggaaaacacatcctatcacctagaagctgccagcctgaggtgttcacttggagataaccccaaaaaatctaggatacagtccctgagatgcagaatatatcttgactcaaaggccatcatgtgtcttcaatagagaagaggtgtggattcaggaaccaaggggtgacagtgggcataccctgctgtacctcactcccagtgaccttccatttaccccctcccaactttagaggtcttgtttccctgaagatgaagtttccacccggagacattgtaaaagtcccactaaatgtgaaagtacagctgtcacccggtcatttggggctcccataccagtaggtcagcaggaaaagaaaggatttcccatactggcaggattgtcaggaggagatagggttcatgatacagagtgggaacaggaaaaagtaaatttgggacataggaatccactgagacatctgttggtgcccacatacagtgattatggatggcaattataccaatatagcctgaaagaatacgttcagacaccacaggagataaaggtcaagtctaggcaagccactgagaccaggagaagagaatctacagtgggtggctgaggagggagctgctgagtatccagtacagcctcaaaaccaactgttgtagtgaagatcatagtttgtctgacttgtcctcttcttttaagtatttttttcccagaaatttgaagccatcactcccttaccaaattcataacagaatggagtgatgtagaaggatttgaaaggttggatcatgcagtcctttacccaaactcctttttaccatgtttgggcacccatcctctatctcctagacctgaatctgcacaatgctgaagcatacttccactgcagaactccctgtggaatcaggctgaggccaccctctgtgggactctgcctgagatcacatcttgctggcttcctcccttccctgccccacctccctagcacgctccctaggagcattaccataataaactacttgcacattatcttaatccatttcatgctgctataacagaataccataaactgggtagcttataaacaactgaaacttatttctcatgattttagtgactgtgaagtccaatggcacagcactgacatctggtgagggcctttgtgttgggccataacatggtacagggcatcatattggtgagagagagtgcaagaaggagctgaatttgtttttataaaaattctttctcagtaaggtactcactcctctgataacaacgttagtctattcatgaaggcagagccctcatgacctaatcatttcataccatcccacctctccatactgttacactggggattaagtttttaacatatgaactctaggagacacattcaaaccgtaacacacaaacctcatttcagatgctttttctgtagacctgagctaagaaggcattttatatgctttggctctgtgtccccactcaaatctcatgtcaaattgtaatccccagtgttggaggagggacctggagggaggtgactggatcatggaagcagatttcccccttgcttttctcatgatagtgagtgagttctcagaagagctggttgtttgaaactgtgtagcacttccccctttattttctctctgtctcctgccagccatgtgaataagtgcctgcttcccctttgcctttctccatgattggaagtttcctgaggcctcctcagaagcagaagcctgtacagcctgcagaactttgtgccaattaaaccttttttctttataaattacccagtctcgcatatgtctttataacagcatgagaacaaactaatactacatcattactttttgtttgtttgttttctcaccctaacggagtggaaaatgttttcgaggagatgtaggggactgggagagtgaacaacagggctgagcctcccatgtatcagaatgaaggcccaaggacacctactgaatggggaaatgttccaaagcctagggcatcctccacataaatggtatcgtctgacaaagcctgcataccacccagaggcactcttactctgccttttccaccatctcaaacagtgaatagaaagaaactatgcagccattacactgtagctaagagggaggaccaggaggtctcaggtacaatattcgaagcaaagaggatgcctagacagagttggcactcatgaactagatgaaatgtctcagcgtggaagccatgtgagcacaaaagacaaagaagagagataggaacgcagcagtcaaggagtccaacctatacaaaaacattactcagggaacagaagaaaattacccacaactgattaaaattagggaaaaatttaatagaaacatgaattcaacaaaattaaaattcaaagatgagatgataaagctacagaacaatatggaaaaagagattagaaacttgggaaacaaaattaaatcccaaatagcattactacagagaaacagaataggcatgactgataatctaattactgacatagagaaaatgatataatatgtaactgacataataaaaatgagtgcatataaaaaagaaattaggggaggagccaagatggccgaataggaacagctccggtctacagctcccagcgtgagcgacgcagaagacgggtgatttctgcatttccatctgaggtacctggttcatctcactagggagtgccagacagtgggcgcaggccagtgtgtgcgcgcaccgtgcgcgagccgaagcagggcgaggcattgcctcacctgggaagcgcaaggggtcagggagttccctttccgagtcaaagaaaggggtgatggacgcacctggaaaatcgggtcactcccacccgaatattgcgcttttcagaccggcttaaaaaatggcgcaccacgagactatatcccacacctggctcagagggtcctacacccacggaatctcgctgattgctagcacagcagtctgagatcaaactgcaaggcggcaacgaggctgggggaggggcgcccgccattgcccaggcttgcttaggtaaacaaagcagccaggaagctccaactgggtggagcccaccacagctcaaggaggcctgcctgcctctgtaggctccacctctgggggcagggcacagtcaaacaaaaagacagcagtaacctctgcagacttaagtgtccctgtctgacagctttgaagagagcagtggttctcccagcacgcagctggagatctgagaacgggcagactgcctcctcaagtgggtccctgacccctgacccccgagcagcctaactgggaggcaccccccagcaggggcacactgacacctcacacggcagggtattccaacagacctgcagctgagggtcctgtctgttagaaggaaaactaacaaccagaaaggacatctacaccgaaaacctatctgtacatcaccatcatcaaagaccaaaagtagataaaaccacaaagatggggaaaaaacagaacagaaaaactggaaactctaaaacgcagagcgcctctcctcctccaaaggaacgcagttcctcaccagcaatggaacaaagctggatggagaatgattttgacgagctgagagaagaaggcttcagatgatcaaattactctgagctacgggaggacattcaaaccaaaggcaaagaagttgaaaactttgaaaaaaatttagaagaatgtataactagaataaccaatacagagaagtgcttaaaggagctgatggagctgaaaaccaaggctcgagaactacgtgaagaatgcagaagccttaggagccgatgcgatcaactggaagaaagggtatcagcaatggaagatgaaatgaatgaaatgaagcgagaagggaagtttagagaaaaaagaataaaaagaaatgagcaaagcctccaagaaatatgggactatgtgaaaagaccaaatctacgtctgattggtgtacctgaaagtgatgtggagaatggaaccaagttggaaaacactctgcaggatattatccaggagaacttccccaatctagcaaggcaggccaacattcagattcaggaaatacagagaacgccacaaagatactccttgagaagagcaactccaagacacataattgtcagattcaccaaagttgaaatgaaggaaaaaatgttaagggcagccagagagaaaggtcgggttaccctcaaaggaaagcccatcagactaacagcggatctctcagcagaaaccctacaagccagaagagagtgggggccaatattcaacattcttaaagaaaagaattttcaacccagaatttcatatccagccaaactaagcttcataagtgaaggagaaataaaatactttatagacaagcaaatgctgagagattttgtcaccaccaggcctgccctaaaagagctcctgaaggaagcgctaaacatggaaaggaacaaccagtaccagccactgcaaaatcatgccaaaatgtaaagaccatcgagactaggaagaaactgcatcaactaatgagcaaaatcaccagctaacatcataatgacaggatcaaattcacacataacaatattaactttaaatataaatggactaaattctgcaattaaaagacacagactggcaagttggataaagagtcaagacccatcagtgtgctgtattcaggaaacccatctcacgtgcagagacacacataggctcaaaataaaaggatggaggaagatctaccaagccaatggaaaacaaaaaaaggcaggggttgcaatcctagtctctgataaaacagactttaaaccaacaaagatcaaaagagacaaagaaggccattacataatggtaaagggatcaattcaacaagaggagctaactatcctaaatatttatgcacccaatacaggagcacccagattcataaagcaagtcctgagtgacctacaaagagacttagactcccacacattaataatgggagactttaacaccccactgtcaacattagacagatcaacgagacagaaagtcaacaaggatacccaggaattgaactcagctctgcaccaagcggacctaatagacatctacagaactctccaccccaaatcaacagaatatacatttttttcagcaccacaccacacctattccaaaactgaccacatagttggaagtaaagctctcctcagcaaatgtaaaagaacagaaattataacaaactatctctcagaccacagtgcaatcaaactagaactcaggattaagaatctcactaaaagccgctcaactacatggaaactgaacaacctgctcctgaatgactactgggtacataacgaaatgaaggcagaaataaagatgttctttgaaaccaacgagaacaaagacaccacataccagaatctctgggacgcattcaaagcagtgtgtagagggaaatttatagcactaaatgcctacaagagaaagcaggaaagatccaaaattgacaccctaacatcacaattaaaagaactagaaaagcaagagcaaacacattcaaaagctagcagaaggcaagaaataactaaaatcagagcagaactgaaggaaatagagacacaaaaaacccttcaaaaaatcaatgaatccaggagctggttttttgaaaggatcaacaaaattgatagaccgctagcaagactaatgaagaaaaaaagagagaagaatcaaatagacacaataaaaaatgataaaggggatatcaccaccaatcccacagaaatacaaactaccatcagagaatactacaaacacctctatgcaaataaactagcaaatctagaagaaatggatacattcctcgacacatacactctcccaagactaaaccaggaagaagttgaatctctgaatagaccaataacaggatctgaaattgtggcaataatcaatagtttaccaaccaaaaagagtccaggaccagatggattcacagccgaattctaccagaggtacaaggaggaactggtaccattccttctgaaattctattggaaaatcaatagaaaaagagggaatcctccctaactcattttatgaggccagcatcattctgataccaaagccgggcagagacacaaccaaaaaagagaattttagaccaatatccttgatgaacattgatgcaaaaatcctcaataaaatactggcaaaccgaatccagcagcacatcaaaaagcttatccgccatgatcaagtgggcttcatccctgggatgcaaggctggttcaatatacgcaaatcaataaatgtaatccagcatataaacagagccaaagacaaaaaccacatgattatctcaatagatgcagaaaaagcctttgacaaaattcaacaacccttcatgctaaaaactctcaataaattaggtattgatgggacgtatttcaaaataataagagctatctatgacaaacccacagccaatatcatactgaatgggcaaaaactggaagcattccctttgaaaactggcacaagacagggatgtcctctctcaccgctcctattcaacatagtgttggaagttctggccagggcaatcaggcaggagaaggaaataaagggtattcaattaggaaaagaggaagtcaaattgtccctgtttgcagacgacatgattgtttatctagaaaaccccattgtctcagcccaaaatctccttaagctgataagcaacttcagcaaagtctcaggatacaaaatcaatgtacaaaaatcacaagcattcttatacaccaacaacagacaaacagagagccaaatcataagtgaactcccattcacaattgcttcaaagagaataaaatacctaggaatccaacttacaagggatgtgaaggacctcttcaaggagaactacaaaccactgctcaaggaaataaaagaggacacaaacaaatggaagaacattccatgctcatgggtaggaagaatcaatatcgtgaaaatggccatactgcccaaggtaatttacagattcaatgccatccccatcaagctaccaatgactttcttcacagaattggaaaaaactactttaaagttcatatggaaccaaaaaagagcccgcatcgccaagtcaatcctaagccaaaagaacaaagctggaggcatcacactacctgacttcaaactatactacaaggctacagtaaccaaaacagcatggtactggtaccaaaacagagatatagatcaatggaacagaacagagccctcagaaataatgccgcatatctacaactatctgatctttgacaaacctgagaaaaacaagcaatggggaaaggattccctatttaataaatggtgctgggaaaactggctagccatatgtagaaagctgaaactggatcccttccttacaccttatacaaaaatcaattcaagatggattaaagatttaaacgttagacctaaaaccataaaaaccctagaagaaaacctaggcattaccattcaggacataggcgtgggcaaggacttcatgtccaaaacaccaaaagcaatggcaacaaaagccaaaattgacaaatgggatctaattaaactaaagagcttctgcacagcaaaagaaactaccatcagagtgaacaggcaacctacaacatgggagaaaattttcgcaacctactcatctgacaaagggctaatatccagaatctacaatgaactcaaacaaatttacaagaaaaaaacaaacaaccccatcaaaaagtgggtgaaggacatgaacagacacttctcaaaagaagacatttatgcagccaaaaaacacatgaaaaaatgctcatcatcactggccatcagagaaatgcaaatcaaaaccactatgagatatcatctcacaccagttagaatggcaatcattaaaaagtcaggaaacaacaggtgctggagaggatgtggagaaataggaacacttttacactgttggtgggactgtaaactagttcaaccattgtggaagtcagtgtggcgattcctcagggatctagaactagaaataccatttgacccagccattccattactgggtatatacccaaatgactataaatcatgctgctataaagacacatgcacacgtatgtttattgcggcattattcacaatagcagacttggaaccaacccaaatgtccaacaatgatagactggattaagaaaatgtggcacatatacaccatggaatactatgcagccataaaaaatgatgagttcatgtcctttgtagggacatggatgaaattggaaaccatcattctcagtaaactatcgcaagaacaaaaaaccaaacaccgcatattctcactcataggtgggaattgaacaatgagatcacatggacacaggaaggggaatatcacactctggggactgtggtggggtcgggggaggggggagggatagcaaaaaaaaaaaaaagtgtatttttatggaatacataaaaggtaactcttgtgagttatgactttgaaaaaaaaaaaaaagaaattaaaatcatttgagaaccactgactgtaaaaaaaaaagacagacagtttatcttaagaataactggtgttcctaaagaaaaaaatccaacaagtagaacaaaatatgtattcaaagatataatacaagaaattttccctgtattgaaaaaaataaatgaacatgctaaaaacaaaacaaaataaacaaaatagcacaatgtgttttagcaacatttgatacagaaattccaacacaaagacacagcccatccaattaagttattaaacttcaaagttaagagagaaatttttacatatctaagcagaaagagaaaaatcacacacaatgggaaaatcaggcaagacactgacttctctacagcaacactcagagcccgacaaaaaggtattaatgtctgtgtttggagggaaagaaaaggcagcaaagaatattacacccagccaaagttattcatgtataaaggcaagaagcatccattctgaaatgttaaatacttcaggaaatgtagaacacagaagcctttttcaagaaaataaaatgaactattcacaattaaatccaagcaattaacagattagaaatacgtaaaaataaacataggaattgagacattggggtagaagaaggaggaatgagcagagagttcacttaaatatagataaacattaagtaactcagggaattatgatgacagaacaaagtgtgaaattaattaagctggacaaggtaaaagtaaaaaagctaacaactcttgggagataggatggtaaaatgacggggaggtgagtaaatcaacatctcatctttcaaagaaaggagccaatagactaaatttgaaacttttgagaaaactcgaaacttgaaatgaatttttttttaaaaaaatgactataaactcctgatgtgtttcacaatctctcttttttgtttttaagggattttctgggaaataaattttacataaaaaaatatgtatttgaagttcacagttccctcagtttcacttcacttacattttcttctattaagtaaaattaaatactttatattttgaaataacatctagagatggtcattttttataaagataagtatttgtccaggtatccatgttactttctatcagcatacataggtgtctggaattatgtttgcctaagttagtgagatttagggttttttaaaagattttcttcactgtacatttttgcctcatttaacgtctttatgatatgcatgattcatttttataaaagcaatagaatgatttccttaaggcaattatgccaagatattaattatagtgattaatttctggtagtaagaatactgatgggttttttttgtttggtttggtttttcataatgcaacttaaacttcaaaaaatatagttaggaaaaataaggatggataatcatgaaaaaatagaagtaaaatctgtaatttctaaatcaggagaggaaagtgatgaaagctttagtaattaaatgtaaatgaggaaaagagttgaagagaagaaaataaaatggtaaagaaaacatatatcagaccctgttgaaaacaaacaaaaaaagaaaacataaaataagcagtaaaaataagttcaaatagatcatgtcagcacttgtaataaatataaacaggtttaagttataaattaaaggacagagtctaacaaattggatttttcttaatctagtgatattttgcttataagagacacacgaaaataaatgacccaggaaggtcaaaaatagaggaatggaaagaatatcgctggcacaacaacaacaaagcagaatagcaatattagtagcagataaaatctaacttaaggcaaaaagcatttatggagataaagaactccatgtaattataaaaggaaaggactcaccaaggagatataacagtcatgaattttatgtacctcacagcaacatagcctcaaaaatgtgtaaagcaaaactgacagaattttaagaagaaactgataaatctataatcagagtgggagattctggctcactgtattggaaattgctccagcagacaaaaattacttataacatagaaaacttgtacaacatcgtagcaagcttggtctaatagatatacaaagaatccgtcaacaaatacaaagtgtgcattattttcaagaagataaggaatacttacaaataacaaatcttgcaacaaaagtctcaacaaatttcagaaaatcaaatatcaacaaatattattctcagaccccaatgcaattaactcagaaattgacaattaaaagacaaaaatatagaatattttaaaattacactcctaaattacttgtgtgttaaaagtgcaaattaccgaaacattaaaatatcaggggctaaaggaaaacagggttctacaaaacataagttgtggaataaattcaatactgttcttgataaattcatttacataaaaagagtgaaaataaatgttatacaactcaagaagaagattaaactcaaaaaaggaaaaggaagaaaatgatcgtagttaaggactagaatgtaagtagtttattaaggaagtactcccagaagaaacaagtaaggaagtgggaaaacacagtaaatacagagaagatttgttctgtcttacggcaaaagagttgagatatactgtatctagccagttactggctacaggatgtctgaggtgggaagcatgtaagcctcaggcacctttagctctccataccagcaggtggctccagtgcccaacagcagtcctttgaagattgcaagtgcaaatttttaagagcaaaatacacggaagctttgggagatgagcttactgagctggtaaatagaatgcacaggcatttagtaagggcatccagggaggctactacagaattttacagaggaggaaaacaagtaccaccaccaaaggaaatgttcaatacaaccagaaatcactcattttaaaagaacgaagtagatagatctctagaaaaacagatgaagaacagcaaaactgcatttttcaaaaggcaatatgtaagcagccaacattgactacgcctagtacgacatatctctcccacccattacaactaaaaattctagacaaaatacaaaaagcaactacctgggggttttgaaaagttaacaattccagagcaaccactaagaaaagtgccagtagattaatttaaaagaaatttaagaaaaaaaaagaaggcagaaaagaaaagaaaaacaaaagtagagaggacaacaaacaacaataaaacgtagacctaaatccaaacatatcaattattgtgttaaacgtaaatgacttaaacatcaagtaaaagacagagattatctatttggattttctaaagacccacatatctgctatacaaatacttaaggaagaaacagtaacaactctattcaatttatttcagaatatagaaaaggaatgaatacttcccaactcattttgtaagagatgtattaccttgatttcaaaatccaacgaagacattacaaggatttttagaagttaaaaactacagatcaatatttctcatgagtgtagatgcaaaattatcaccaaaatattaacaaattctaataatattataaagataatacaccacgatcacatgaggtttactctgaggatgcaaggttagtttaaccttgcaatcaatgtatcgtattagcagactaaagaagaaaaaccatgtgattatcttaatagatgcagaaaaagcacttaacaaaagtttaccaccatgactttttttaatactcagcaacctaggaatttaagagaactttctaaacctgattagggccatccacaaaagaaacctacagctaacatcaaatttaatagtgaaagatggaatgcttctcccctaaaatgagaaacaaggcaaagatatctaccttcatctctcttatgcagcatcatactggaagtcccagctagtttgacaaggcaagaaagggaaataaaaagcatacagattgcaaaagaagaaataaatatccctttattttcagataacatgatgttaaattaaatacattaaatacaagatcaataaacaacaaatcaattgtatttctatatactagcaatgaaaaacatttaaaatatgttttaccatttactgaaacaggaaacacatagatataaatctaacaaaatatatgcaagacctgtaggctgaaaactatgaaacactcataaaagaaaacattcttttcttttctaaataaatggagtgacaaatgtatgtccagaggttggaaattcagtattgctctcaattctccctaaaatggtctacaaattcaatgcaatctcaatcaaaatcttagcagaaattgttgcagatactgacagggtgtgtctaaaatttattgggaaaggcaaaggaaatagagtaaccaaaaaaattttgaaaaataaaagtaaagttggaggactcccactacctgattttaatgcttatcataaagctacagtaaccaagagagtgtgatactcgtggcaagatagacatatagatctatggaaaataaagaaactccagaaatagacacagacaaaggtggccaactgatttttgacaaaagtgcaaaggcaagtcaactgagaaaaacataatgccttcaacaaatggtgattaaacaattaggcagacaaaaacaaactctactgacccatccacacctcacaccttatgaaaatattaaaacgtagtataggaataaatgttaaattacaacacttctagaaaaaaaggaaatctttatgactttgggttagaaaaaaattcttagatacatcgcaaaaatatgatcaacaatagaaaaaaaatgaatttgatccaaatcaaaaactgctctgtgaaagacactactaataaaatgaaatgagaagccacagactgggagaaaatatttgcaaatcatttatctgacaagaaaaacttctattcagactatatcttaaaatctaaaaactcaacaacaggaaaacaaacaacccaatacaaagtgggcaaaatatttcaaaaggcactttgacaaagatgatacacacagagcaaataaacacttaaaggttttctacaccattaatcattagaggaaacacaaattaaaaaccacagtgacctgctaaaaagactaacctgtgcctattaaaacaactgaaaaaaataagtaaaacctgatcattttaactgctgcctaggatgcagagccacaaaaactttccaacaatcgctgatgggactgcaaaaggtagagacactatggaaaacagggtagcagtttctcataaaggtaaacatgcatttaccatataatccagcaatcctaagcttaggtatttaactaatacaaatgaaaacttatgttcacgtcaaatcctgtacataaatgtttatatagcaactctattcgtaataatcaaaaaactacaaacaaggtgaatatcttcaactggtgaatggataaacaaattgtggtctacacatacagtggatactatccaacaatagaaaaagaacaaaatattaaaaatacaacatggatgaatgtcaaatgcgttacactggtatagcagtaggtagtatggtatgtagcttttgagtctagctatataatcctatttgtatgtcattttggaaaaggcaaaattataaagatgcttgccagaggttgggggtagtaaaggtagttgacaacgataaggcaatatgagggaacttgggggaaaacactgaaacagacttggtgtgctggtggttacatttgtcagaactagtagaactatagaccaaaaaggataaattcaactgtatataaattaaaaataaataaaaacgatttgaaaaaaatactgagaatgaaagagagacagcatgacagattcagaagagatattttttaaccataagaaaaaacatgaatcactttatgccagaaagttagaaaatataattgatgtagacaatttttggtaaaaaatataaattatctaatattgtgactcaaaaaaaatgagaaatttgaatgaacaaagaacgattaaataaattatatatgttgccagccgaaaatctatttcttagatagacagcaagcccaataactttataggcaaatatttcctagattctaaacatactaccacatcatactaaaaatattttttaaaacacaatttcagaggacagaaaaaggaaaactatccaaatcatgttatggggctactataacctcattaccaaaaccagataaagactactagaaaacaaatacagacttgtttgcacacatgtatatgtgtgtatatatatatatgtgtatgcgtgtgtgtattttatatatacatatatattataaatacatagaaaaataaagttcatcaagaatcctaaaatcaagatcagcacataaaatcagtaactcttctagaatccaacaatgaaccattaaaaatgttattttttaaagagtcattcatagcagctgtaaaagctagcaagaaatataatgaagctatttaatgtacttatgaaaatattacatactataaaaacaccaacatgaataccaatatgtactatgttcatggatgagaagacattatcataagcacatctaattttcttatattgaactataaaataagaacaatctcccttagaatgttaacacttttttgtaatgaagcttagcaatctgatcctaaattcgtgctgagtgacaggaaggacagacaagacaatttttaaaagaaagtgtaaacaatgtaaagaggatgtaaccagtaataagatttgctatagagttggcatcactgaaacaatgtggcattatacaggaacagacaaatagattagcggaacaaggagaaagcgctgaaacagactcaagtaaatataaaaacttgatagataacagaaaagaaattaaaaattagtaaagaaaagtgaactcaatacatggtgctgggacaatgatacatctatctatacatacatagatgtacatgtatatgtatatccatgttaaatatatatatatccttgtgtatagatataaaaatatttaatgtttatatagaatatattgataaatatacagtatatatagtcctacatttcactatttacaaaaaagcattctaggaattttaacattttgaatgtaaaaatgtaatctagagaatttctgttttccctctgtatttagtaacacgtaactgacaaataaaattgtatatatttaaggtgtacaatgtgataccttgattatatataatatataaaatatatataatatatataataaaatatatattatatataataaaatatatatattatatatatattttatatataatatatattatatataatatatataaaatatatatttaatatatattttatatataatatatttaaaatatatattatatataatatattatatataatatatttaaaatatatattatatataatatattatatataatatatttaaaatatatattatatataatatattatatatatatatatcttgtgaaatgattaccacaatcaatttagtaacacatccatcacctcacatagttacctttgctgtggtgagaatattcaagatctattctctgagtaaatttcaagtatacgatacagtattactaaatatattcaccacactgttcacctagaacttattcctcttgtaactgaaagtttgtaccctttaaccaacatctctccttctttccctcccccggcccctgcaaccccactccacctttatttccatgaacttgtctttttgagattccatatataagtgagatgagatagtatttgtctttttctgtcagacttattttgcttagcaagatttcatcaagtttcatccatgttgtcacaagtgacgggatttccttctttttatggctgaataatattcctttgtgtatatacaccatatctttcaacatatgattcatctattcatccttcaacacttatgttgtgacaaaagccatagcttgactattgtgtataatgctgcagtgaacacgggagtacaggtgtctcatcaacatactgatgtcatttcctttgaatatatacccagaggtggggtcactggatcatacaccagttctatttttaatgttttgaggaaactccctactgttttccataatagctgtgccatttatgttcacaccagcagtgcacaagggttctcttttctccacatctcaccaacatttgtcatcgcttgtctttttgataatagacaaggtgtgaggtgatatctcaatgtggttttaatttgcctttcttccgtgattagtgatggtgagccccttttcatatacctgttgaccatttgtatgtcttctttgagaaaatctacttgcccatttttaaaatcaggttctttgtatttttggtattgagttgtatgagttcattatatattttggatattggcctcttatcaaatatatggttgacaaatatttttttccgttccataggttgccttttcatttcactgattgcttcctttgttgtgcagaagtttttagtttggtgtattctcacttgtttatttttggttctgttgactgtggttttgatgtcatatcatagtttcttaaacacaatatcaggaacacacaccatcagaaataataaaatgctatgtgtaattatattaagattttaaaacttctgtgtgctaaagatacaaagttaaaagataggttataacataggactatattccaacacatataaccattaaaggattagtatcaagactatctaaagaactcctacaaagcaattacaaatagtttaatggtcaaatttataaaagataaagcccttatggactgaatgtgtataaaatgctacttcatttcactaatactcagaaaatatgcaaatcaaaacaatgagatgaaataccacatcagaacacatcaccagattagctaaaatttttaaatctggcaatatcaagggtagttatagttgaagggaaataaaaacattcacaagttgttggtgggaattaaaatttatataaacactttcaaaaacaatttggcaagctgatattaaggtgaaaatccatacatctgatggcttggcacttccacttccaggtgtacatggaagaggaacatggcatacaagtcaagaggacctgctcaaagatgttggctgcttcaaggtaaagttcagcaatggaagaataggtaaatgatcgtggcatattcacataataaaatataactgcaccactaaaataactgaaggtgtacatctcaacagggataaatatctcagaaatacaatgttgcataaaaatatattaaaggccagttgtagtggctcacgcttgtaatcccaacactttggaaggtccaggaaggtggctcacttcaggccaggagttcaagatcaacctgggcaacatagtgagaccccatgtctacaaaaaataagaacattagccaggcatggtggcatgtgcctgtggtcccagctactccagaggctgagctgagaggatcgctggagcccaggagttggaggctgcagtgagctatgattgtgacactgcagtccagcctgggcaacacaatgacaccctgtctcaataaaagtggcagatatgcatgtattgtgtgaccccatgtacttaaaatgtggatgacacataacaattatgtatactgttcatggatacatatacatgaggcaaaagtatccaaagcctgataaggaaggatacatcctatttcaaggagtggtcctgcaggggggtgaggggtgtataaaaaaaagactctagctctatctgtaatcatttgccttaagaaagaagaagcacaagagaaaaggtgagagaagagaggggaggaaggaggttaaaagatagatggataatggaaacatggattattgctacattttccccgtttttttttttttgcttgaattgtttttataacagaaagaaggaaaagataggggagggaggaaaagattaaatagaaattcaccaaaatgtttaaagcaactatctcagggtagggcatagtggagaattttattcttttatttacatttttttcatattttccgaattatccccagcaaacatgtatcgcttttatgagctgacaaaaacaataaatgctctttgtaaaagcaccttgctaagctgttgtgatttaaacgcctggattgtgggagagacgctgatattctggacatccgggccagctcccggagcgactgtccaagacaggtttctgggggaactgataagcgaacaaccgaatttaaattccagtatcagtagcagcaacccaggcctcaggaggtgagggctccaggagtctccatactctgccggcctcccaggggacagggctgccacaagagataaaagccagctctctggttctctccaaaaatctttgaaaatcgttttttgaagatcgaggtgactgaacctcataaccatgttatcacaggccccatctatgccattgaagacaagacgggcatccctaaaagacctagcccgtgggcatgatcctatgtgcttcctgtggacacccggctcaatgactggccaagcccatccccagtggctttttcatattgcttaaaacacctctgggaagtcttattaatcttgtctctattttacagagataaaaatgggactcagagaagttaattgacttgggacagggccacccagctaataagcagtatggagtcaacacccaagaaagccactctgtgccccaggggagtcccaggaggccaccctttgccccagtagtagaatattgggcaccaataacaggctaaggggagaaatcatattggatacgtatgcaacattccccaaagtcccaaacccaccatgacagcagccccaaatgcaggggcagaacagggcctattctgaggtcaaactgtacattcctgtcccctgactccagtcctccaatccccctcagcccacaggggtccttgtaagctagagaagctgccacattcacggtgcccaccctgtcctcccatctcccacttcccgtgctcaactctcagacagttaatgtgaatagatgagaagtttaagtaccttggaaagggctaaatgaataggaatgggaaaatcccagtgtttttctcccatcagtctttctgattgctcttaactctatttcctggacagggtctgtggcagtcaagctcctggctagtcattttttatcaccatcgggaaaaacacacagtacttagagcagcaggggccctcttaatatctaggcaggaggtaacccacagggcagctattccccaaaactggaaatggctcttggaggcccggcaggtttctgcacaccaaccaaacgcctgagctcccaggagggagaagaggaagactggagccttctgcccagcctcctgattttcttcccagggctcccggaccccctaccccaagccttagcccagctcccatgctagatgacttcatatcctatcccatggggcaagttacagaaaaactggaactccccatttttatatgaaagtgcctcaatttgttattagtggcaactaattttaaaaagctctaaatgctctctggactgaatgaaacaagtctgcaggatgaatctggcctctgggctactgtttggtccacgggctggctaagagcaggtctaagacagacagcaaaacaaccacaacatataaatgatagaagatgcctcatgcctatcctgccctgactgtgcgccagacagcccatgctacagccattgtgtggcagtgaaagaaggcctcgcatgaccagctccgttttgctcctaacctacccccacatgatatcttctaggttaactgctattgctgatctctgcatgtaggccaagctcactatgggaggaatttcatttatagtttaaagcaaagacgatcatggtctcttcccaacactcacccccaaggagataaggagggcatcccacgagcaacaccacgtgttcaagatgcatccctggaacctgaacacgggcagaagattgcacaacctccctggacccttactggagcaggctgtccgcggtcctcagtcactttttttttttttttttgagatggagtctcgctctgtcacccaggctggagtgcagtggcttgatctcagcttattgcagcctctgcctcccgggttcaagcaattctcccacctcagcctctcaagtagctgggattacaggggtgagccaccatgcccggctaatcggctaatttttgcatttttagtagagacagagtttcaccatgttggccaggctggtctcaaactcctgacctcaggtgatccatccgccttggcctcccaaagtactgggattacaggcgtgagccaccgcacctggcccttggtcactttttcatcccaacctcccccgcttcccctttcccttaacatcaaaacagcctgagatttgtactgacttaggatggttctgtagggcattcatctaccctcctcttggctgctggctctccaaaataaagtcgtcttccttgtcccgactacttgtctctcgatgtccatgggtttgggcttatgctaaaccaacaccatgaggtagcggcgcaggtgttttcggtgcccttggtctatcccagatgtcagcagctactatggtgggcaggcccacaaatgcgggcagcagccctcccgagggcctgcccagcctctccacactctggctaccaggcttcttccagggatacaggatgaagtcttccaacgtgggagctgggccaagacctggggctgctcacccagaagtggggcagaagtaacccttggcccatgggatacaggtatcagtggatgcaggcctctacctgtggcctttggagggacaattttgaggggcattctgcatgtacctcagggggtcccagacaccgcgagcccctgtcacctgcagccataaccagcccagcaatgcactctttcagaggaatccgagttaagatagtttgctgataaagaccctgcagctcagagaggtgaagtaatttgccgaaggcctctcagctgctgaaggacactcagggattgaagaaggacgaactggctctcatgtcctgctcctgaccactgcactaccaccttcttagagaaaaccagtcggaccctccaggcctgtggctggttcttgctttctgcatctgaacctgtcagtgagtccagaggagggctcgccaggactgtagccaaaaaacaagagtcccatacgtgcactagagggtccaaagagagcgcagtcggcgggacacctcctccttaatttgggcccaggatgccacacagacctccggagcttacctgctcttctccttggaagggacagatcagagctggaggggcttcgagctccctctaggggccagcgagacctgtgccagccccagagctgcagcaggccccgagggcaggcgctgaggcctttgctctacaatgggaagacgggagccgcccttccccagaccccactggctggggatgaacagaaggctcataaagaagagttgttccaaaagcttgcccttcctgggacccagtgaatcccccattgcctcaagacgcagggcggagagctgatctgctcaggatgtctggagcgagcggggctcatgggcaggcgagggtctgggtgtgaggcaggcggcgtgcgaggcttgcctccctgcagactgtcacgctgggggtctcactccccttcctcgtcgccccttcccaggagagtggacacaggctaggaccccaggcctgtctgcagcgtggcctccgtcaccgtctgtgggatcctgggccatcaggcagctttcctgggtctcagttttcccatgtacacctcaatagccacaatatggattaagctgtccctccacgccaggcctttcccgcatcacaaaagctccacggctccagtgcttagtggtcatccccattgtagagctgagggaactcagatgcagagaggttgagtaacttgcccgaggtcgcacagccagcccacacccttgcgaggctttccgactccagaggccacatggagttctatgcgtgacccttcctctacactctttctttctggaaaatattattttagagacagccttgagcccaacacttctaggatccttaattgagcccaacacttccaggatccttaatctgcaaggatgtagaaaaagaagcctaaatgatccctgagttttgagaggctgtgcagataaactcatcacccctgagcaaaatggaaagagtgaggagtgaagagcaagggcacagtgggacagtgatgggctgcccagggtcctggcactcacagggtagagaggtcagcaggtctgggaactagagtacgctggatccctgggtgtgcctgcaacccctcaccaagacactccctgaaacatccccagggaaagacccatcatggcctgagctgcagccatgaagatttagggatcatgtgggagagaaaagttggaaccaagggcccacactcctcaggaggggtgccaccccacctctcctcacactaacccagctctgcagtcttggcaaagtcctgggagaatgaacagagtcccccatgctcagcagccaggagttggcaggaggatactgccatggaccccttacatggccacagccaaggagagctgctgtggggcacacctgcccttgtgcagggccaagagtgacctacatggctgttccccacagggcggagacccgggagagtctctctagcctctttttcacagcctcccctgaagccactggcatgtggccagcgagacccactgccctcagagaccaatatgtagccactgacctctgtcaggagagaagccaaccagctcttgctctctgcccactttgccacccctaccattatttttggggccttttaatccctccataaacccacctcataaagcagagtatcagtgcttctcagcagtgtccagaccctcccccagaggaccagatcaggagggaaaggaggagggactgagtcctacacagtggctggcacccctcccttaccacttgggctaaaatcccagttctttccgtctgggcctgaagatctgttataaactgtcccatccctcatgacctcagcttcagcaggggagtccagcacccggaatccaggaagaggcaggaaagcgtctgctcacatgaggagtcacatccattgcggtgcaggcccccggaggggtcagggctgctgtgctgttcccatgttcccagctaggaccctgagcctcagacagggccaccaagcagagccaggccaggagcccgggctcctgatgacacacttttccacatgtccatcccacacactcccagtcagccccttgctgtccactcacccaccccataaacacctgcagagcactgaggctggaccctgcggaggctgcctgaggcatctgaaaccagccaggttccccatagaactgatgtttatggatttattttcataaacatagaaattgaccctcccagtcttaaagcatgaaacttacatttgtcttatctgagttcctttcccaggaaaccaaccttcaggcctcctggatagtatcaagaaactgaaaatcctcttctttacccctctggaagcctattccttactacataaactcccaattttagtcaattgggaggatggatttgagactgatctactgtctcctcagccccaacacccgaaaaagccttcttccctggcactactcattgtctcggtcactggctttctgtgtggcaagcaacaggacctaaaccaaaacctggtgttttggtaacacatctgtagagtctaggcaggaatctggaccaagtgctccttggggtcaggaagggctcaaacttgctgggccccccttatgcccagaaatgcatatacagtggcctcgggtctggaattctctcccacagggcccagaagaaggctgggccacagacacaaggaggagtatgaaaatgcacttgtgtagcccacatgattaaataacagggaccacacacacacattgtgccaatgtcaaattcctagttttttatatcgtgccatagttatgtaacagtggagcagcaaaagaactaacagcactcactccatttttgtttaaggggcctttacctgttcctgcaggtcagctagaataattttaaagcactgagataaaatgcaaaaattgcattcatgtagttcttgaaactgtattagtccatctttgcattcctttaaagaactacctaagactgggtaatttatgaagaaaagaggtttaattgactaacagttttgcatggctagggaggcctcaggaaacttacaatcatagcagaaggtggaggagaagcaaataccgtcttcacaaggcagcaggagagagagtgaagggggaagtgccacttttaaaccatcaaatctcatgagaactccctcactatgatgagaacagcacgggggaaccccccaaccctcaccatgatccagtcacctcccaccaggtccctccctaacatgtggggattacaatttgacatgagatttgggtggggacacagagccaaaccatatcattctgccccggcccctcccaaatctcatgtcctttttgcctttcaaaaccagtcatgccttcccaacagtcccccaaagtcttaactctttccagcattaactcagaagtccaagtccgaagtctcatctgagataaagcaagtccattccacttatgagcctgtaaactcaaaaacaagttagttacttccaagatacaataacggtacaggcattgagcaaacgctctcattccaaattggccaaaaccaaggggccacaggccccatgtaagtccaaaacctggcagggcactcattaaatcttaaatctccaaaataatctcctttgactccatgtttcatatccagggcacgctgatgcaaggggtgaactcccaaggatttgggcagaaactaactctgcgattgaaggggaagtgtgtaaataattgtgttttgttcaagatttataggagcactgtgacctgacctaggacagaggagttcccaacctcctgggaccttcacaggcacccagatgtctgcagctggtcacacgtcttgatcccaactcccttcttttccccctgccctcaacatcaaaagagcctgaaatgtgtgctgacttgagacgacctttgtgacactaacccactgtcttctcaggttgctgtctcttgaataaacctgcttttccttctaccaagtcttgtctcccaaagttggctttcaagtgtggagcagctgaacctgggttcagttccagtttcataagatgtgaccaggagaaaagcaagtgaagggtgcactggttttctatctttagggacctctcttactgctgtctttgcaatttcctgtcaatctataatgatgccaaaataaaaaccgattttaaagtcctcacagggaggtaagactgtgagatgtttctgtgggatggtggtgtctgccaggaaactgaccagctgacctggtgagtctgccaagaaggtgccaagctgtacagatgctatcctgggcagcgtcttcctgccccaggctccagttcagggcatgtctcgcggttctcttcttgtccattgctgccagtttgcaaagacaaccccataggagaacataggctcctccatgtgaatagaagagaccctgatttatttcttggatggggaaagatcttggaggggctgcaaagacttacaagaggacagtggggaaacgattacatgtcagggtgtttcattgtctggggcctcagcagcccaatttactgttcctgggaggatcagaacaagggccatgataaaccaaggactggaggtgagcaggggtggatgtgagagggactggtgtcaggagaaatttgtgcaaatggctcacaacagggaaaatctctagttaaaaataggctaacatcattcccagcagcccattcctttcccactgtgctccccaggaacaatcccactcatcatgataaaatctggggaaagagaaaggctggagggcaccacccccccgcccctcagtgcagtgttccagggcctgcccactgcctggggaggcgatgccagcactcatctcacagcagagcatgtaccatcctgtgccatcctgagcactccttgcacactgtcatttcctgcccatatcaaccctctgaaggagggcccatttcccaggtaaggaaaccgcggccgagagagcttacggaactcatttgaggtcacgcagccaggtctatctgacctcagctgattctttgaaatgctgtgtcaggctgcccccagcagtgacaaaggtgacctaggatggagacatattcctttaaaacagctggagtctccaggggtcaggatggatgcttgagtgatgggtgcaggcagccgggcccagaaaccctaaggtgctttctctgccattactcagagcccctcgatgtccccccaaccctttccaaagtccctcagcctccatcatgtttgatcctgaggaagaagaggtctgtccagccccattttgcagatgatgaagctgaggccagagtctcacaacagagcagacaccacatcaggccttctgactctgggccgtagaaaggctctgcagagaggaggtgtggggaggactcctgtgaggcctggcagggcatgggatcccctctagcagtctcaggctataggcagcagaggcagagagtgagcctggcaggggttctggagctcctggcctcttcctcggcctaaatctcggcctttgcagcatgcgcatgtcagctgcacctctgacctcaccaggggctgccagctgactctgatttacctggagcttcctgcttcagggacagtgaggagccagccggcctctcctggatctgcacccagtgagctcccattcctaccctccctggggcctgggagctcagggaaggcactgggctggaacagcaggatgggctgagcccatgggccatggcactggggacccaggttcctgtctcccccagaccactagatgactaacagtgaaacagcaaaagaactaacgtcactcactccatttttgtttaaggggccttgacccattgctgcccacaggctaagataattttagagcactgagttaaattacgcaaaaacagcaatcatgtcgttttttttaagctaacactgaggctaaagggaagtctgtcaacaaccaactatgttttgttaaagattacaggagtattgccacctgaccgaggacaaatgtgttcccaacctcctcggaacctcgctggtgcccaaacgtctgaagtcctctaccacctcttaatcccagcccccttttcttttccctgcccttaacttaaaaagaacctgaaatgtgtcctaactaaagatggtactttaggacgctagtccgccatctttgtggtttgctggctggtctgaataaacctgcttttcctcccaccaactctcaccccttgtgtttgatgtttaagcagtacacagccgaactgggtcctgttacaactgcagctgcttcccatatctacgggatccccattggtgtggtgctgaccgcctggaagtcctgcagggactcctaactgtgaggcacgtatcccaggagcaggtcttggcctggtaagactgtcctaagtcagaggctaacagaaagcctccagcctggtaggatttgaaaggggatcctggaaaagtccccaaaacctcccaactatgcctgaaaactcagaggtctgcaacagcccccagcccacctgaggaggaggtctgcattactccacctccagggctgtctgtcttttatcaacccggatgcaggggcagctttcagggatgcatggtatggggcggataggagctactgggatgagagcggggctgcaaggggagggggcagacttccctatccttgtcctacttcattctccctccatccctgcccggttcatgctcccattcccacttcacagatggcccggccacaatggtgaggggtggctgaagccaggattcaaatccacattacctcactcccgagctcttttccccatgcaggactgcaaggaagagaggatggatggacaggtccacattgtcaccagtccaccaccgtggcccctgggacacagagcccccactcagcccacctggtctgccatggacaggataagttagcaaaaaccaagatgaacaaaaaatataggaaatctgactataagttaataaatttgatttgctacagaaaatgcatctactttttcagcattcatgaccaaaataaatacttttgaccacaaaaaataccctctataagttccaaaatcatataaaatgatatgggccacattctttcatcacaatataataaaactagatgagaataattaatgtttaatgttaaaaacctaatcatttagggttttgtgtgtgtgtgtgtttgcgtgtgtgtgtgttttggttttttgtttttgttttttttctgagacggagtttctatgttgttgcccaggctggagtgcaatggtgtaatctcagcttactgcaacctctgcctcctaagttcaagtgattctcctgcctcagcctcccaagtagctgggattgcaggcgcctgccaccatgcccagctaattttttgtatttttagtagagacggggtttcaccatgttggccaggctggtctcgaacccctgacctcagctgatccacccacctcggcttcccatagtgctgggattacaggcatgtgccactgcgcctagcccatttaggtttttttaatttaaaaaatctaaaagtctcctacaaaactcttgggttaaatagaatttgcacactatttagaaaagaatgacaatcttagcatcaatcaaagcttacaggattcaaccaaaagtagactcagaggaaaatgaatagccttgtttgatctcatgactaaacgagaataaaaataaatgaactgaagagtctactcaatcattagaaaaaggagataaaatgtagcacaagaaagtaggagaaagaaagaggcttctgtctccacctgagcaaaataaatgctcaggttcccatttcatttacccacagacagtttgcacacagtaaggcaatacagatgcttgagactctgctgtagatcattttacttatggaatctgtttaaataaacattatagaatatttcctgacatcaaaaactattttctacgtaaaattattttctatgtaaaacattaaatgaatgtagcacaacttcaatgtcagagccagactaaaacttgtgaatgagtatccttgaccccacccactagaacaagtccaaccaatcagacagaaaaatctctgacagaacacctgcgtgtgctctctctctctctctctctcaaccccagatgccagattcaaaaactaactaaatcaccaccatacatataaggtttgttgtaaccaacacagattatttgaaaaggtgaaccgatgatggtgataattaggtgaattcatactaacaataatcattaaatattaaaagtataatttattttacaaaattgcccatgcaaggccaggcgcggtggctcatgcttgtgatctcagcactttgggaggccgaggcgggcagatcacaagatcaagagatcaagagcattccggccaacatggtgaaaccccatctctactaaaaatacaaaaaaaaaaaaaaattagctgagcgtggtggcacgtgcctataaccctagctactcaggaggctgaggcaggagaatcgcttgcacccaggaggcagaggttgcagtgagctcagattgcgccattgcactccagcctgggtgacaagagtgaaactccatctcaaaaacaaacaaacaaaatgtccatgaactgaaaagaccataatgagggcagaaagcctgaatcaagtactacagaaagttgaaaatgagcgattttgaggaacacagcatgctgtctgcatgagtgtggcagaggaacccgctgactccagtgctggctgaggtgggccccctgacacgttagtcagggcagctgactccctggcacctgtgaccacagggcgcatgactgaagaccgagagcctccttgtgcttgtggtggtgtctcctctgccagcagtcaatgaataaactccctggggacagaggccagaccatggagccctccaggaagcttactgtcatgtggggcctgaagtgagtgcacgtcaaataataatctctacaaaacgttagcactattggaaagatcccactcttatcaagaagcaaggccaaaataataagagatgctgaggaagtaggggaggtggaagaggaggaaacgaaggacagggaaaaagaagaggaagggaaagaaaacagaaggaagaaaagaggaaaggaaggaaaaacggaagagaaacagcatattatatgcgaatgtctgctagcgttccatttgaacacacctgctaagcaatttttagaatccttcagtgtccacctcagaaccttccagatcatcctcatctcatatgatccacccttggcctgcagcagtgattgtctgtgtgacccacacatgtctgtgttgattataattaacttaataaccactttatttttaacaaatttattgaggcataatttacataccataaaattcactcaaaattactttaaagaatgcatcatgaacaacgagaaaagaatgtctgcaaagttctttggggacctgcaattaaagcatgcactgaattgcacctgccctgagaagtggctgccatggactggaccctttgatccgctttttaagaaagagccaagggcatgtggattccagggggcaggtgcgaccgcatgtgctcaggttcctggacattcttgcagtacacagagcagccccacttcatcgcacatattatttctctgaacactgctagaaaggattgtgggctataattagaatgatgccccacaggattacattcacaaatgtaattacataatcatttagagctgactggcacaggaaacgacattgcttcctaagtgtggagtgaggggaggtgctgggcacctctggtggagctgggcattctgagactcctttctcatgccagctgagcccagaaacagttggagatgagtccaaagatccgtaattcttcactggatttgtcttggtcatcagtctgtatcccagggtcccaggtttggggttacacacagtgcaaaactacccactagtggccgggcacagtagctcatgcctataatcccagcactttgggaggccgaggcaggcagatcacctggggtcaggagttctagaccagcctgcccaacatggagaaaccctgtctctactaaaaatagaaaaattagccaggcatggtggcacacaccgataatcccagctactcaggaggctgaggcaggagaatcacttgaacccaggaggcagaggtttcagtgagctgagatcgagccactgcactccagcctgggcaacagagtgagactcagtctcagaaaaaaaaaaaaaaaaaagtacccaccagtaacggttgcaccttgagttgttgtttcaaaaatttccagcaaaaagctcatctctggtaaaacaaaaactgattggatccagagatgaactctggggaactctcctagttaccatactagaatccatggccagagaggaggctgttttctctacatgcaacatatgtggaagcatgatctacgatcgccttgactccgcctctgcatgcaatgactcagctccccagcccaatgcaagccctgctttctccagtgtttagaaaagcactgctctgggaacgatccccggtgttgtgagtaataaaagccaacatggttgtggtcattgcactgccgaccaccaagccatcaaacccacccatggtgtgggtgacaagtccaccacagaatttcatggatgatgtggaaacttcccaagacgccccaaactggacttctcccctggctcctgttaaacgcaccaggaaagtgacaacgggcttggcatccatctgttcttcttgtttgtttgatagaaatcctgtctgtggcacatatgtgattgcaagcacagagtgccggccacattagaaaagtgcatagtgtctgttgtcttactctcctgaagcctgggcggcactcagtcctttggagtttctccagcgttgtctagctgcaggtactgagtccgtcctatttcacacagagatcaacgtggcgacacacgcctgggcttcctgacacatcctgatcttgcatcacttcattctctctgatggcagtgattttgttcagtatgccccactttccacaattttctaagatcttccatatatttgcatgcatgactgagaagaaaatatcttttgttggtccaagtgtcctaaatttgggtccaaaaaaaaaagtggtagctgtataagtagaccacatcttttgaaaaccatgatgataaatcacattaatttggaccccattaatctggactatgtgctaatcccataggcctaagaggaagcttagcttagaagaaagggtttgctttctaagcaaagaaagatgcaaacaagccacagcaagcgtaacctacttagaagcagatgctgtccttaaagaaaaaggtgtgcaataagctacactgcctgtgagtcctaaaccccagctcatcctccaccttcgccatcagccagcctacctacagtgtcctatgaaactcgagtccctcacccattccaagcaaccacagcacttcctccaaaactggcatcagaagtggaaatgctcctggaggctccctggtcctgtagcctccttggggaaactgaagcccagagaggggacggagccagtccagagtcacacatccagcaggtcagcctggtgattagagctcaagttttgactcctccagactgagtttttaaactcagcctggactcttacttggggatgttagacaaattccttgaccccatcgagtcaccatgtgctcatgtatgcaccgcagagggaggcaggagcctcccttcccactgaggtctgggtaagactggcctgagctccaactctgtactctgtgtaagtccaaggccctccccaagatcactgcaaatccttgtgctcatccctgtcccagaatcctgcttccctgacactgtctctgttcctcaccacgttgactcaaatgagaacacccagccccatcctcaacatgcacacacaactgtttgtttgtttgtttgtctgtagatggagtcttgctatgttgcccaggctggagtgcagtggtgtgatctcagctcactgaagcctccacctcctgggttcaagccattttcctgcctcagcctcccaagtagctgggattacaggtaaccatcagcatgcccagctaatttttgtattttttagtagagacagggtttcaccatgttggccaggtgggtctctaactcctgacctcaggtgatccacctgcctcggcctcccaaagtgctgggattacagtaggcgcaagccaccgctcctggccgcacacacaactttctaagtgttgcaggctttgttgaagggagtagacttgggttgtgtccttagcaggacagaaagagggccagggttttgtactcctttgtcactcagctgtgagctatggggagcagggggtgtagtgagaacaaagtgattctggggtgtgttcatccactttgtgttgctataaaggaatacccaaggctggggaacttataaagagaagaggtttgtttgactcatggtgctgcaggctatataataagcatggcaccagcatctgcttctggtgaagcctcaggaagcttccactcacggtgggagaagagggaacagatgtgtcctgtggtgagacagggagcaagagagaaaggaggaggtgccaggctctttttctaaccatcagatgtcctggtaactaacagagcgagaactcactcatcaccaaggggacagcaccaagccgttcatgggggatccactcctatgaaacacctccccccaggctccacctccagcattggggatcacagttcaaaatgagacttggaggggacagacatccaaactatatgaagggcaacagccaacacacagcagccagggcagggagcagcagctcaggaactggggctaatctgggcaccaccagtacctgccgcaggggaggaggtggagatggggctctctagctctcattgcaaagacacacttagcatcaggcaccactgttcttaaaacagccttggcctgcactctcacccacatccacaccaccctcacaccctcttgcccctttcctcaatcctctgcctctctttctctcgtctccctccctctagagaacaacaacaaaaaaaaaactcattttcttctgcagaacaatttaatcattctttaattcctctgttgctgagctgctgccaacaccctcaatgtggcgacccccatcccaggttgccagttttagagctgaaagtcccccatcccaggaaaaccctcagtcccaagcaaactggaacaactggccactctccaaactgctcttccagcagccacggtggctctccaggctccctcccaaatggacagtaagtaggaactggctaagacagctaatcatcttttctttttaatcatgaatgggtgttaaattgcatcgaatgctacttcagcctctatttggagtcacatggtttaatctaccaatggagtaaattacattagtagatttcctaatgccattcctttgttgctggaataagtcacactggaacacgctgtatgtatttttcttgtgatcacattcttgatttgatagactaatattttatcagtaatgtttgttcctaaattgagtttcattcaccgtagtctttggccgcttttctctgatgttggtgcctggaacagacgtgccttttaaaatgagtgtgagagcactcccactttttcacacctatttccttcctgcctggtctgggggcatgagtgacaaatgaaagaagaaaggcatcaaaagacataatataggacatttgtttcaaggtgaaggactttatgtttatatccaaaaggcacaacatgttcaagaaaaatttattggaaatgacgagcatcaggaaatacaatggttaaagaaagaaaataattcttcatgcactcacagaggaaaaagaagaattttcgggggaagggaggactcataaaatcatgctggattcagattcttcctcggcaagtttcatccagagggtaacggagcaacatccacaaatcacagtgaaaataggaacccgtaatgctgtggtcatctgacttgtcattggagccaaaaagccacaggcaaacattctcaaagagcctggaagaactcagggagtgccgcagccatgtgcgtgtctttaaaatctctgtgatagttacatccgggcaaagtgaatcacaaggaaaaggaaactggatattggggttgggggagggaagatgcagggaaagaaagggagggggagggaatcctcacactagtgcaaaacccatggaaaggcagctttaaagggaaaaccaaatatgcttcaagttgtccttaaaatataaaaatcaagagacaggcattctctagcatgaaggacacaggcaacacagaacccatgatgcttgaaaagaaagaaaaaccatttcacaataaaatagagcctcaacatagaggaaaaagccttggaatggaaaagtcatgaaaaaaatgatgagaactgaatgcaacaaaatgtagaattaaaagaaactctgcagaagagaatccaaacattataaatatagacaaggtaaaaagactagtgaacaaaaattagtaggggaccttcaggaaaaaaaaaaacaaaaaactcctaatttcctcacctttcaacagcacagagcccgttgaaattgtctagaatggaaacatcctttaaataaaatgactcccagcttattttttccataaccttttttccctcaatcttcagaactcttttaagaacgatggttttttgaggcaaagaaacattgctctgaaattcaaccattgtctcagtttcacttcagatatttcattgctgctattaactaagaaaaattcaaccattttattttaaaggagtatgtgggccaggcacagtggctcctgcctgtaattccagtattttgggaggctgaggcaggaggatctcttgaggccagaagttagagaccagcctgggcaacatagcaagacacccatctctattttaaaactttataaaacttagccagacatggaggtgcatgcctgtagtcccagctactcaggaggctggggtaggaggatcgcttgagcccaggagtttggggctgcagggagccataatcacaccactgcactccagcctgagtgacagagaccctgtctctaagaaataaaattaaattgaaattgttccactttatcacactgctcctattcatgtatctgatatattcctagagagacatctggaacgaccactagttaattttaacaattatttctggatagtgagatgttgaattgtgtataattattcttttttcttttatttttgcttctctttcacttgaatcatttatgaacatgtaatatttttgtagaagtaataaaggcattatttttaagggagagaaaggaagggagggagggatggaggaagggaagaaggaaggaaggaatgaaggaaggaaggaaagaaaaggggaagaaaggaaggaaggagggaggaaagaaggaaaaggaaggaaggagggaaagaaggaaagaaagaaggaagggagggaggggtggggagggaggaaggtaagtaaggaagggatggggagggaggggaggaaagaagggaaggagggaggcagggaagaagggtaggaaggggtggggagggagggagagaaagaaagggtggggagggagagcgggaaggaaagaaggggtggggaaggagggaaggaaggaaggggtgggcagggagggggggaaggaaggaacgggtggtaaggagggaagaagggaagaagggaaggaaagggtgggaacggagggagagaaggaaggaaggggtgaggagggagggagaaatggagggaaggaaggaaggggtggggagggagggaaagaagaaggaaaggaaggggtgaggagggagggaaagaagaaggaaaggaaggggtgaggagggagggagggagggaaggaaggaaggaagtgcgccaaagctcttaggcctgaatgtccaactctcttatctgccttcacaaggcccaagcccctctcatcagtggccaccttcctagacacccacatccctgcagcagtgtggtgacgccagccaggggctgctctgactctgactctctgaggcgcctcaggaggtggggggatatttgacacaacagactccttatcaggctatgattttgcctgaaaagggttcagcttttgtctccccttttctcttccatagccctggattcacttcagaaatcaacacaggaattgacaggagtcaatgggccatccctgaggtcacagtggtcagagccctgggctgggggtcagaagaccaggctttccctggcctcactgcgcgaccctgggcaagtctcccccagtctctgggactctgttttcccctattgaataagagggcctgcggctctgaggttccagcatgcagtgaactctcattagcaatggtaaattaagaataggcatatgggccgggcatgctggctcacacctataatcccaacaatttgggaggctgaggcaggtggatcacctaaggtcaggagttcaagtccagcctggccaacatggtgaaaccccatctctactaaaaatacaaaaattatccgggcttggtggcacacacctgtaatcccagctacttgggagtctgaggcaggagaatcgcttgaatccaggaggtggaggttgtagtgagccgagattgcgctatagcattccagactgggtgacagagcgagactccatatcaaaaaaaaaaaaatggcacatggtactgggctggacggtagaggcttccacccgaggcccaggcacaccccccgtgtcagaccccattattggctgctggttgatgaagtgtagatgagctcaggtgggttcagaaacttgcccaagggcatccagctagtagtcgagtcagaaacaggatctcagccccatcctgtctcgccctaaagtcttattttcagttgctactccctcagttgcccctccctgcagcacccctgtccctgagccgagtttgagcaatggcacaggggtaggcctctgctgctggcctagttccatgccctgggacagaggggagagacaggctcagtccctccccagggccaagcagcttgctgccgcccaggaggcactggtagaggtggccagtccagggtatgggaggagagggctgctgaggcaaggctggcctcctgctgaaggctggggctctcctggaggggtgggcaggactggagggaccagatgtggtcaaatgagagcagtggagggactaggcacaaccttctgggaaggaggcagcttggggcctcctccccagagcttcttcagcaccagggtgcctctcagagctgaggaaggcctgaagtgcaggtcccagcatggaactgggatagtggcaagtgagaggagctgcagccaggacagtgctgggcaggaccgacgtgaggagggcccggagagctgccccatcactcatgggtccaggcagggcccagacacacccctgtccaggaggctgtggaggggatgcctgccagtggggacggtgggctccatcacccctgcagagaacacatggtctttctactgcccagatctgccacctcccaaaacgacaccttgctattccttgggctcagcatgcttcaccaccctcaagtcgctgtggttctgagagatgcatgaccccaatctggccagttaggacgccccagtcccctggccactgccaggggttcgggtatagaaacatgacttgacttggttgaggccactcattctaagacttttgccagaatcactagggaagggagaatctctggattaaacccaaacagcaaagtagacagacacatagacagggagagagacacacacacacacacacacacacacacacacacacacagagagagagagagagagagagagagagagagagagagccagcccctggatcaagccatgcctgaagcctgaccttttgttgactgagtcgataaatcgccatctttgctttataagtatatgatatgtttctttttcagctataactgcaagcatcccaataaagcaggttcctgaggcccttccagttgggatttggcaacttctctatcctataaataattccctgctaggcgtactactgtttctgattgatctcacctgctcaattctcaaggctaattatgaagtaaagcagtcaacacgtggcaaaagtccctgagccgacacctgggggaacaaaatgctaccatgtactggctgcacatgaccgaaacacatgcccccatccagtcaccaggctcacccttcaaaaaagccacctctggcaaggtgacagaggccaccctctttgcccctgggcctacttctgcttcaaaagacctcgagggaagggtctcaactctcccactaattgctaggaaggaaaattctggggtggaaagcaggaggggtcgggccaagcaacactttgcagaggacattggtcaaggcccaggctgactttcccaggggagcaggtgctaaggggctactgtgtgtggttggcaccaaagcctgctgtttgcagacagtgagttggaggaagcttgaggctcccaaaagcccaagcaaatggggtgaatgcaagggtgagaggcacccacccgcacctgcacacatgagcctgctgagtccccactggaattccctgcttcccatgcatgtcatggggacctggctccccagccaattgtgagctcggggtgaagagctgaatgtggcctatctctgaacaccctcagcccagatccccgcctggctgggtgttcaaaaccgaacgaacaaatgaacgagtgaatgaatgaagcaccttccacgtgcctggcaccattcagggctctggggcttacaggagctgaaggcaggcaagggctctgcctgggtgctcaccttctctcagagcatacctctcagcgggggaaggtggccatctagacaagggccgggcactggtgacagcaggctgccttgggccacccctgccagttaggactggctgaccttctaactagcactaaatgtctcctgtccaagctgatttcttcaagtgtctgccccaggcatggcatttcaaacttccctgagcagaatgacacagaaaagcacggtgaagtcttgggggatgagaagcccgtgggaggaggcagcccttgtgattcctgagttcatgcagagattggacccaacgtggtcccccagctgtcctgtgctataatgggctttcccatagagtcctcatgggcagctcagtgtcacaaaccattttgctggaatctagaacctgttgctaaggccaggcctgggtgtgacctcagggggctgaggactggtggtcctacacaaataagctccctcttccccagctaccagccctgaagctctgtgaggtcagaacagcaggtcctgcgggatcccttctgcagggccatggcatcccctttgtttttatatttgcatgtaaagaaggccactcaggtgctcaaggtcaaataagcccaggtgactttccatgctagccaactccttccttacaaagcagttgagttctacatccaggcaccggtgaccctcccaccatctcactgatctcgagatgcagggaagaaatggatcaagctcccccttcaccaatggagaaactgaggcccaaagaggggagatgatctgcccaaggtcatgaagagatggcagcagggccagcaccagagctgccactcctgcgggctcctggctcagtgcttttcccactgtgccatgatgtgaagctggtagtcctttttctctcctactgaaggaactaaaacacagccaaactgtcaaaaatatcaggagcaagatgaccacactccaaagaagcaacagtttaatgattctccacaacgccctaactgcttgaaagatagtgcattcttcaaaactgccccatgccgaacagcctaccaaatagcttccaaagttgcagatcaaatcattgctgatattttgaggagctccgtgtcaatagctgatgttaatattttctgagagacggcattgtggaacaaatgcaaaaccaatgccatctgtctccaggaaacagctcgagattccagacatcggagaggcctgacacaaccaggttccggcacgagaacccccacagaggtggagcaagatgggaaacaaagagatccatttctggtccagaggaatcctcccctggttcttagaagacaaaattagtgagatctctgaatgattcttcctctttaaaacgctgagcccaaatgcgtgtttgtgatatcatcatcacatttggcagcaggttggcgtgtggtcagatagcaggagggacttcctcagtaagagatacagagatctgcaagagaccggccactgaggctggttaccatgaatgcccgttctcccaggaccaattgcctgaataagacagcctccaaaggcgcctggaggccgaggactcttagaagactgggtcagctggtatacccatcagaagccggctctgggaacttacacagaggggattttcaggaaggatactgaggcctcacagactcactatgcagggagcaacttgggcttgggaaatggtccatggcagctcctgaagtccaggccttcagatgcactgtgaccactgagtcagccctcagaagactccccaggaagcgtgcagcagagccccagggtggcccgttcaggagggcatccctgcggggatgacagcactcagcaaactgcctccccgcagatacagccactccagctccggagttcctgaagacctcagaggctcttaaatggcgagcatccttggctacccagcacggaggctacttgtgtacatcttgtttctatggtaaccccattccccaaaccctaagcaggacataaggttagatgagacagacacatgtgcatggggagcaaggagcaggttttaagcctggagaactcgggtgcccagggtggctctggcactatctctctgcggtggaccgtcccagtacacccgggcagctctgtgctcccagctgccctgagcatcagtgtcatgggctgaaccaacacacagggcagccccagccctccctgctccaacctctgccggagtcagggctctccaagacagtgcagctgggcaccatggtggtgaccggacgccaacagctcaccgccaccccgttccctcggatggacccatgtgcctcgtgcagtggaaggggctggctcttgtccttttcattctctcatcagcctggttcccctgaggactgcctcagtctcttgattggattggggactgccttagcatgctctggtgacaagtgacattcgtcgagtggtgggactggaacagatatgccacagaacagacgatggggctgctgccatcggtcaccaggattacaaggagcgggggccttggaggctggacgaatctgtcttaatgtaggaatgacagtcaggacccttggtgacaagtgacagaaacacagcctgagccagatcagggaagagggagggcttgtaggtttacaggccaaacctcaggaaaggctggcatgctgcggacagctgggatcaccaggatagtctccatctctcatccgcctttcccaggatcagcaccacgcttgcagacctgtcccctctgaagagcttggctgtggcagccacaggtcccagctcacaagctcccagcctccctagggtgatgaaggctggggcaaggccttttctcagcccccagttgaaaactcctgctgaggtgctggcttggagcttggggcatgtgcccttccttgggtgccagccccatccttgcccccaggacctggatggtgagtaagggaagatgtcccccccaagaggaaggatgctgctggtgccaacaagaagacagcactcagcaaagtgcatgatgcccacttcagggccatggcctcagagcatctccgtgtcagctctttttttttttttttgagagagagtctcgctctgtcgctcgtgctggagtgcaatggtatggtcttggctcactgcaacctccgtctcctgggttcaagcaattctcctgcctcagcctcccaagtagctgggattacaggtggccaccaccaagcccggctaatttttttattttttagtagagatggggtttcaccatgttgtccaggctggtgtcgaactccaggcctcaggtgatccacctgcctcggcctcccgaagtgctgggattacaggcataagccaccatgcccagccctgggctcttcttactggcaagaacagaccctgagtgtggaccctgcacaggctttagcatctggacgggactgtgagtctgttttatgttgccagagaggaatgtctgaggctggagaatttatgaagaaaagaagttgatttggctcacggttctgcaggctgtccaggaagcatggcgctggcatctgcttctggggaggcctcaagaagtttccaatcatagggaaaagtgatggaggtgccagcatgtcacatggtgggaaaggcggggaggggccaggctcctttaaacaaccagctctcaagcgaggtaacagggcgagaactccctcgttacctccaggatggcccaagccattcctgagggatctgcccccggacccaacacctcccaccaggccccacctccaacactgagggtcacatttcaacatgagatttggcggggacgcacacacaaaccatctcagggtgttttcctggcttcatcccgaactgcactgatgtgcagtggaaagaaagtgggggcaaaggtgcccctccccagaaagatgtgccctgagcagggccctcaacccctcagcctcagagaagcacacactcatccactgagcatgccaggagcccccatgagtggggtcggagggagaagccggcaggtgatgtacccttcaagtcactgggcagtgcccagacccaggcaccctaccacgcccacagagcagcagccagacctcccgaccccaccagatgccccccatcctctcggcctctccaaccccctacccggctgtaagctcagtcctttcatgaatggaataggaagtgagacaggggagaaaggacacgggaggtggtggcgagcaggtcactggtgggcaatgggggtttgagcctgcaagacacccctggcaactgcgcaggacacatctcagagctgggccacataagacgggaggaagctgcggcatttatccatccactccattcatccgtcactggctggagccactcctgggatgccgatgcccacacgcctccgtggctatagggagcccacaggctgagtcacaggaaccgagggtaaggtggctggtgtgcagggtggccgtgcgtgtccaggaggtacagggggcatgccaacagcatccactgtgtctccaggcaggcacttctgcagggctgagacaagccccagtgacagggagggggcaggcatcccagcagggctcagtcccagagagaaacttgggcctcattcaaaaatgaccaacagtcagcaagggtattggggtgctgcatttcctgcagccaccatgagcctgggaagctgactgcccaagtggcctgcccggaaggcgcacttgccccagaatagaactctctccaccaccatgtccgtacacactacagggtggggacacagacacaatccaccctgttacatcaagtcagataactctcttgcctgcatcataattaactttactttcttcaaaggaacacattaaggcaaaatgttggggatcttttaaaacaaagccattttcctcactaggattatttttgatgagctaagtggtgttagtttttaaattgcaatcgagagagaaagcacgcatgcacagagccatcgacaattttcatttccaacaattgcagttgtgaatcctgctaccaatgctgctaatagcttccgtggtggtttatactgatttgcctaagagccaaaccccaggcttctgtcttgaagaatcaaagggtgactcgggccaattagtgcacatcttgaaccacaccttctctggaaagaaagcattcttggcagtacccacttatcagaatcgtggggtgttctggagcccctgatgggaaatggagtggtttagaggaagaggttaaatttgacctgttggatcgtgacctcagtggagcattgggggacccagtcattgactctccaccctcaagaatacaaaatgctccaacatggaacgttccagtggacggcggcaaccggcatgctatgggctcctttaaaaataagccccattgttccccaaccgcctattaatagcttgaaaagacatctgttcctaatttggtcttctcaaaccaagaaatcttcccttcactttcctccagggctaggatgaaatcaatcaagctacaaaatttattaagcaccagacacattctgtcccagacctcagagccagccctgcaatgtggcccaagcactcgaaggccctggtctgcacggagcatgcacccttcctccagctcagatggcactaaagagcccccagggtgagccagtcccacccagttcagtgccccagctccctctgctccgtcccctggggtcagctgttcgaacagtttctgactcgaggcatagctcccttagattctgccagggacgggcagctcactgtctctcagatgacccctctcattcccaaatatctgcagctgctaaacactcccaaactcacctcccacaatcagtcccatctctctggggccacacgcagcaggttgactcttctgattatggcaagccttcagctacttgagtggagatgtctgcccgtccccatgactcctctccagctttggtacctgggtagcagggggctgttggggacccaatgcccagacaggacaagcgagtccagggacgtaaagccacatggacgcccattcctggcagcagcttcagcaatcatgtatcctccacgccccctgcacccactcctgcagtcccagacgcacagctcaccattttcagggtacacggtgctcgccacaccccggggcctttgcatggctctccccacttcccagtatgctttcctctgctttctacaaagctgttccccaaccttgtcatccagtccccagtaacggtccctgaccttgctgctcaagtgcacccccagtcacgcccaaagcacacccctctttcaattctctactgtctgatttttctctttattcacatttatcatctttctgcccctctagaatggaagaccatgaataagcacaggggaaggactcaataatcagttgtcatctggataaagaaaacaactttccaggcagaagaaacggcagctggaaccaagacacctggagcagccatggagcagcggtggaacccactggtcctgagcacatgcttcggcgtgaaaaggacctgtggccagctgtggccctgggcaagctgcttgaccttcctgagtctcgcctctgcgtctgcacagtcaggactggcacagcgctggcctcctgatgctgtgtgtggtgctgtttgcagagcacttgatagaatgcgggttcaaagcaaacccttcatctatgggccgaggaggaaacctggctcagtgcacaggccagcccaaggagagagatgaggcagggctggccagtggggatgcagtggccttcaacagcatgtcaaggcttctgccctggggacagcacagtgggaggagctgcccagcctcatgggctgaagtcagaagagccagaaataaacgctaccctcaaggcctagatggggacctgtccctgactctactgtctccgtctgttcttcccctgtgcacctatagaagagcctcaggccccctgggggactcaagctcagggagggggcctatgtggggagcaaatctgcagctgcttctctctgtggctcacatcccctaggagtgataagggagcaggccctgctctccggcctcagcctcagcctcagcctcagtgtccctcccctctgccggtaccagcccccgggtgtgagagaaagcagaggtctgaagaaatgggctcccagagggccccgcctcaaccccactggcccaaggccccctgcagctcctgggcctgagccaaggcaattccgtcagtgccagggtccccaggacacagccaggattgtgcagtccgcggcaggctcccagccacagctgaggggacaaggcccagctgttcctgcagacaagtgggcagctttcttcccacatgaaaagggaacctgtgtctctgggggagggacaggaggagggaagaggccaggggaggcccagggatgactgctcagggtcctgtacagcctggggtgggcaggtggggccaggaagagggaggcagccctggtcctaagcaagcctcccagccaccagctcaacccattctccacctctgacccctgtgtgaccctgggccagccccttccctaatctggcctcaggtttctccattgaaaaaaaagaggaggtgaagaatttccccttcgtcctagcagagggacagcttcaaggacgatgctgcctgtctccttgaatggctggactcgcagccaggcacggtggttcatgcctgtaatcccagcactttgggaggctaaggctggtggatcacctgaggccaggagttcgagaccagcctggccaacatggcgaaaccctgtctctataaaaatataaaaattagccaggcgtggtggtggacgcccgtattcccagctacccaggaggctgaagcagcagaatcgcttgaacccaggaggcagaggttgcagtgagccgagatcacgccattgcactccagcctgggtgacagagtgagactctgtctcaaaaataaataaataaataaataaataaataaataaataaataaataaaagtttggactccctaagtgaggagggtagcaggacatggtggaacaaggccagacagagccttcagaactccgtctgattggagggtagacccacgccccagcacgccctgcgcggcctaggaaacagtgtgtgtggccacccacagtgcgggtcccaagaccccgggaaggcatccaaggggaggcactggaggcggagttaggatcagctctgccccactagagcccaaatgcaccatcccaggacccccggggcccttctctgaaaactgacaggacagaaactatctggagagagtctcttttgaatgactcctcttccatgggccttatcgttaatcatacacctttctttggagatgagaaatccaggctgggcacggtggctcacaccagtaatcccagcactttgggaggccaaggcaagaggatagcttgagcccaggagtttgagaccagcctggacaacacagtgagatccctgtctctgcaaaaaattaaaaaattagccggatgtggtaggatgcacctgtagtcccagttactcaggatgctgaggcaggaggatcacctgagcccagcaaatcgaggctgtagtgagccgtgatcatgccactgcacctccagcctgggcgacagagcaagaccccaactcttaaaaatagaaattaaattaaaataaaaaatccacctatgtctgcaccaatctctaccacacaccccagggcagcccaaggcaggccctcttcccactgacttcaccccaggttccagcagaagctccctgcacaccaggccctccagggctcagctgcagaacacgtgggacccacaatcccaggaaggtgaagtctgggccctccaggaaggggcagatgacatgccaatagggttggtaggtgaggctgtttgcagatcattgagcccttctaggagagataggggatcatgtaaactgggtcttattaaatgtagcagcagctgctatttaatgagtgatttttaatgggagataaagacctggatagagactgccaggactctttctgtttcagaaaactgagctccaactggagtgtggaatgcaacaggaaggtagtaaggtccacggaattgaggaatgcagggtgcacctctctcccagcacggctgcatcgcgggagtcagctctcgggatctctgctccggcttgtccccaaatggtgcagagccggctctggccatcctcacagcccgccttgctggggacaaaggagtgccactttcctggtgactctggccaagctcaccatcatgatgcacgcaggtccagccgggacaccgtgcacccttgaccctattactgcagtcaggggccagagtgtcctgattggggaggcctgactcatggttccctgtctgaggttgtgggatgggcccagtgagacaggcgagcaggggcttacctccacacagaaagcccatgacctccctggcacacaggtgagccggcaggctggtccccgttccactctagggaagaatgagagcccagaaaattgtcactgcgccttccttcctgggagactgccttttgtcgtgttgatgaagaggtgtttgcgaggcctattcacgttgctggagagccatctttaggacaggtggtgtccatgccgcctcgggggacgtccctgctccagggtcaccccacagagctgttgatgcccccagcgccctccgacgtgatgaagagcctccaagagcagagcgggccaagcctcagacatgttgtaacagtacgtggaagtcattagcttccattttaatttaagaagcccaattttataaataagagcaaattttcccaggctattatttctaattacgcatttacatcaattcacattatgcggttgatgaaatgttaataccaaaggcaattttctgctgatgggtggcatggagaggagtttcttcacatcacaagtcaatatttttgggaataattatccagttgctcaccagagtctgcactgactaacctaatggctgtgtctacacagtccctaacttgaggcgctaagaggggaaatgctccaatggggagagaaggtggaggagaccaagatcacgctgaggggggaccctggacagctctgatgtggcctctcctggctggtgggacaggctcagaatcaactgcactgtggaccagcatcacgtcttttgattattttacaaaatggctctagaacttagactttcatgtgcaaggtgagaatggtgatagtaactttcttatagggtaagttaatatatgtatgccttcattcacttgttaatctaagaaacacttaattgcacacctcctctctgtcaggtacacagtaggtactcaataagtgatagtgcatggaatactatgcagccataaaaaagaatgaaattgtgtcctttgcagcaacgtggatgcagctggaggctatatcctaagggaattaacaccaaaacagaaaaccaaataccacatattctcacttacaagtgggaggtaaacaccaggtacacatggacatggagatgggatcaacagacactgggatctacaagagggtgggcagtgtgtgttgaaaaaccacctatcaggtactatgttcactgtttgggttaaggggtcatcagaagcccaaacctcagtatcactcaatatacccatgtgacaaacccgcatgtgtcccccaaatctgaaataaattttaaaagaataaaacaaatggaagtgatgactctgaggaggaggaggcacagacatcctggcagagtgagcccgtgggaacctcctgggtctgggtggcatctcagagttgaacggcaccacggcaacagaggcagagaaatcacagacatctgtctgcagatacagcccaagccctgaaggacacagtcagaaggatgtgtcgttcagtgcaggagagcccctccaactgctcacagagcctcttctatgaggaagcgcagtactaggtgtcagggcatgggagaggcaacaggggccgggacgaggctggaggctgaggcggtgaagagaaatagacagatctgagagctgtcccaaaggtaacagcccagatctcagcaataggccgcagagggtagggagggaaaggcatcagggatccctcatgttgggctatgtgggtgtcaggccaattaccaagacaaaaaacagaagcaactaccaggctcatagtagaccagcctcaagcccctgctgagagcctggcttgcgaaggaaaatcaccagcttcatatgaacactgtgaagttcccttgtgacatctccatggaagcccaccaagataaaggaccacctccatctggagctagagaagagggcacggcactgagctgtggggaacccctacactctggggtttgacaaaggcggccaccagaaaacttacaaggagacggagatgtgtggccagagtcactagaggaaagtaaagagatctggtcacagaaacccagagcttcagaaagcagagctcagcctaataagctagaaagtcaagatgaggactaacacgtgcacctcgaatttgagaacacgccagcactgaggcacctcagcaggagccaattccgggacagggtggcctggaagtccacgcagaagacacacttgtccaggaggcagggaggccttgctgtgcagggaaggaagatgggtggtggcccctgtaggcctgtgcaggaagacctgggaatggggcaagccctttgtcctctccagcctgggaccctcaagcccaggagtgaggagctaagtaggcagtggcagggacctcagggctggggctccagctacttcttcttgcgtcgagctcggtttcttgtctgtaaaaaggagaggaattctaggcacagcattggcatgagggtgaaaggagagcacagaacctgacttgcagaggtgcacagccctcccaggcagagcaacgcacaaacgcctccctgcagccagcaccacctgccagatgcttccctgtgaccagcaccatccgcgattattcctgggctcaaatgctccagtgccaggcacaggtgagagggtaacttagatacaggactgaaaaaaaggccaaattcaggggtaacatcctcacccaaacttgaaatagattaaaaactcaggtgagtttgcgaacccatggggaacatagctcacaggcacttcaagtctcacaagcatccccacagctggcatgagggtgcccaactctcccccgtcctctatcactgtccccacaggtatttttttgagacagggtctcactctgtcatccagatggaatgcagtggtgcaatcatagctcactacagcctccacctcccaggctcaagtgatcctcttgtctcagcttcctgagtagctgggaccacaggcacgcaccaccatacccagctaattttctgtattttttggtagagacagggtcttgccatgttgcccaaactggtctcaaccccctgggctcaagcaatctgcctaccttaacctcccaaagtgttgggattacaggtgtcagccactgcacttggcctgtcaccacaggttttaataaggctgagaggagagtgggcaaggacacacctcagaccctctggttggatgccacaccaaagtatcctgcccagggagccacagctggggctggacagaggaggcctagagccccatgcaggctgaacagaggtggcaagctgggccctcacatcagcctgcagacccagcagcgtttatttttgcagtagaaccaacatataacaattagattttacataaaaatctgggtttccagcttcatctgaaacactggggcagctggccacgcagggcttgctctccacagggcagccacaggccagagcccagcagctcccaccccaggaatgcgggagggcaatgtggctccaggccctgccaatccccagcatctcaggcccgccccccaacaccccattccatgtctgcctgtcccctgcaggcccctccacccatttccctgcttgtcctcctgccccttatggcctacaaatccacatgctgggccccaagcctctgagagctctcggacgccaccttccaggcagcaggggagggaaagaagccctggggctgcacgggcagggggtcccctcttctgcggctagggcaagtcctggggagcaggtctttctggccaccccaagcctgcctggcgtggaggggaagggtcaccatccactctgccctcaagagcagcccagcaagggaaggaggactgttctgagaaatgaggaagaaagggaagtcgggcccagaattgtgaccccaggagggaaagtgtgcccttagaagaaagcaggatggggcagggtgtggtggctcacacctgtaatcccagtaatttgggaggccgaggtgggtggatcacctgaggtcaagagtttgagaccagcctggccaacatggtgcaaccctgtcgctactaaaaatataaaaattagctgggtatggtggtgcatgcctgtaatcccaactactcaggaggctgagtaaggcaggagaatcgctcgaactcaggaggtggaggttgcagtgagccaagatcgtgccactgcatgcctgggcgacaaagtgagactccatctcaaaaaaaaagaaaaagaaaaaaagaaaagaaaagaaagcaggaggaggaggtgagaggaaggatgggaggtggagggaggaaaagagaaggagactgggaatgaggaggaaggagagtggggacgaggagaaatgagagggggaatgaggaggaaggagagtggggatgaggagaaaggagaggggggatgaggaggaagaagaggggaaataaggagaacagcggggatgaggagaaaggagggggatgaggaggaagaagagcgaggatgagttggaaggagagggaggatgaggaaggagagggggatgaggaggaaggaaaggaggatgaggaggaaggagggggtgatgaggagcaaagagagtgaggatgaggatgaaggagagggaggataaggaggaagaagatagggaatgaggaggaaggagagcaaggatgaggaggaaggaggggagaaaaggaggaaggaaagggggatgaagaggaagaagagggagggtgaggaggaaggagaaagaggatgaagaggaaggacagggagtatgagggcgaaggaggggggatgaggaggaagtagggaggatgagtaggacggaggaggtatgaggaagaaggagatggggatgagggggaaggaggggggatgcggaggaaggggggatgaaaaggaaggagaagggggatgaggaggaaggagaggaaggatgaggaggaaggagagggagtataaggaggaaggagagggaagatgaggaggaaggagagggggatgaggaggaaggtgagggagtataagaaggagagggaagatgaggaggaaggagagggggatgaggaggaaggagaacaaggatgaggaggaaggaggggggataaggaggaaggaaagaaggaatgaggaggaagaagaggggtgtaaggagaaagggggggatgaggaggaaggaggggggatcaggaggaagcagagggggatgaggaagaaggagaacaagaatgaggaggaaggaagggggatgaggaggaaggaaagaaggaatgaggaggaagaagaggggtataaggagaaaggagagaggggatgaggaggaaggaggggggatcaggaggaaggagacgggggataaagagggaggagaggggggatgaggaggcaggagacaggaaatgaggatgaaggagatgggggaggaggaggaaggagagagggatgaggaggaaggaaagggtaataagaagaaaggaagtcttggagaaggaggaaggagaggggggatgaggaggaaggagagagggatggtgaggaaggataggaagatgaagagaaaggacagaggggatgaggaagaaggagagggaggatgagaaggaaggagaggggcatgaggaggaagtagaggaaggatgaggaggaaggagaggggagatgagaaggaaggagaggggggatgaggagaaaggagaggggggataaggaggaaggaggggggatgaggaggaaggagagggggatgaggagaaaggagaggggggatgaggaggaaggagaggggggatgaggaggaaagagatagggatgaggaggaaggacaccagggatgagggggaaggagtgggggatgaggaggaaggagagggggatgagaagaaaggagacaggggatgaggaggaaggaaagggggaataggaggaagatgaacagggatgaggagaaaaaaggggagatgaggaggaaggagagcggagatgagaaggaagaagaagggggatgaggaggaagtagagggggcatgaggaggaagaaggggggatgaggaggaagaagagggggtataaggagaaaggaggggtggatgaggaggaagaagagggggatgaggaggaaggagggggatgaggaggataaggaggaaggagaggggtatgaggaggaaggagggggatgaggaggataaggaggaaggagaggggtatgaggaggaaggagagaggggatgaggaggaaggagacaggagatgaggaggaaggagagggggatgaggacgaaggaggggggatgaggaggaaggaggggggatgaggaggaaggaggggggatgaggaggaaggaggggggatgaggaggaaggaggggagatgaggaggaaggagaggggcgatgtgtaggaaggagatggggggatgaggaggaaagagaaggagggatgagaaagaaggaggggggattaggaggaaggagaggggcaatcaggaggaaggagacaggggatgaggaagaagggagggtatgaggaagaaggagagggggatgaggagaaaggagaggggtgatgaggaggaaggaaggagagatgagggggaaggagagggggatgaggaggaaggagaggggtgatgaggaggaagaagagggaggataaggaggaaggagaggtgtaatgagggggaaggagagggaagatgaggaggaaggagagggggatgaagaggaaggaaaggggggacgtggagaaaggagagaggggatgaggaagaaggaggagggatgaggaggaaggagaggggggatgaggaagaaggagagggggtatgaggaggaaggagatggggggatgagtagtaaggagatggggggatgagggggaaggaggggggatgagggggaaggaggggggatgaggaggaaggaggggggatgagggggaaggaggggggatgaggaggaaggaggggggatgagtaggaaggagatgggggatgagggggaaggaggggggatgaggaggaaggagatgggggattaggaggaaggagaggggggatcaggaggaaggagacaggggatgaggaagaaggagggggggatgaggaggaaggagaggtgtgatgaggaggaaggagagggaagatgaggaaggagaggaggatgaggaggaaggaaagggggatgaggaggaaggagaggggatgaggaaggagagggcagatgaagaggaaggaggggggatgagtaggaaggggaggggttatgaggaggaagagagggatgagtaggaaggagatggggggatgaggaggaaggagagggggaatcaggaggaaggagacagggtatgaggaagaaggagagggggacatgaggaagacagagagtgaggatgaggaggaaggagacggtctcttccaagagcaaggtctccactttcctgttgcctcacacggactgccggcctcttggctggaacacaccttgctgccttttccctacacacacacattctgtatacatacataccgcctgcacacactctgggcatgtcattatacacactgtgtcatctgctcacatcagctgtcactcctctatgccagcagacattatttgtgtgtgtgcacgcacacacacacacacaggggactccccatctgcacacacgctctctgtctgcacacaataggcatgccatccacacacgggtatactgtccgcatacaagtgtgtgcacacacatacacatcctctctgcatacctgctgtctgtgtcctgaggtcacacccctgggaccccagcacctagaagagttaggggacacatagccatgggaaagggtggtgcttgaggctgagacccaggggtggccaacctctgggtggccaacctctgggtccctccccaggcccagagacagggaggcaggtgtgggggaactatgcccctaccgaccctccaggcacactccaggtgtgggggaactctagcccctgccaaccctccaggtgcacttgccgctccctttctcatctctcaccaggcctcccccagctctgtcactcatcccctgcccctctgtcccctcagcctgctcaccctagtatctctctgcccatcccccagccaaaagggctctggaagccacggtgtagaccgatggcaccactgcaatcacacgggaccaacccttccacagcaaagaagtgagagctctgagcccagcaaggcctggtcctccatccaggtgtgccccccaccacccacctccaagccagcaccaggcctttcacacagcaggcactccctagagactcgccaagctggataaaacctctagataccacttgtctaaagtggcatgggaccagctcaaaacttgacaaagaatcttgcacccattatcccccctcaccggccccgggtcctggaaggagccggacagcgagtggcacttgctggtgagtacagagagcccagccggagagaggagggaaagggggattagggggcacaagccagtgtggcccggcgccggggctctccccagacagagaatctcaatcaatagggctttttatttttattttgaaatggaaaaatgacattttgcaacattaccgtgaaaaattaagctagatctgaagcatcacagatgttttgcaaataaaaccagggctttctgtggctggtgattgctgaatttaaacccgcaggtaccctggcccagccagcaggccccgggggagcagtctgtgtccacctgaccctgcgcttctggggaagcgtggtctgcctacagagcctagggggacagcagccacatgtacacgaggccaggcagccccagctccccaggcacggtgaccttttgccaacttcggaccggaacacaaatctaccatcactctatatcggctttgattggatcaaaatcccatcggaaaacagggggaaaggcaataaaacctccagaattgatattaaaccactgacatttcacaaaccgcgcagcgctggcagctgccagtctatcagcaggagggactcgaaggggacaagtcaggcatgaaggtcacggcagtaccacagagctccgcccaggccccacgtcagcaccaaggggagaaagggcctagatggccacagcccccccaggaccaccccatccctctgcacctggttggtccatttgccacatgtgctctctgcagtgggggaatgaactgacctctgaagccaaagatgatgtcaaatccggaggttgtgactgtcctcaaaccccagtactgtgcctactgcagtcccacagtgcagaggccaccacctaggatgagaccaggacagaccaaggttcctctgagagaacagcttgggcctgaggccccaccagaagatgtgaaatggcctcagcttcctgcagcccagcacccactgacccctgccatgtgccaggcaaggtgactaggcaggtacgaggatgaccagagcacagctcctgccctggaagggctcagagcatgcatctttttttccaggtaaccccacctgggcagaagctgggagtgggctgaaatgagaccctgccaggtcccagccccctccccgagcacaccgcctctcacatggacattgggcctcccagagcccatcaactctggcacagacttgcatgcgcatagagccagccctgtgctggccttcgagggacagtgcaagaagccgttagctccctccagtactcagggagacccagaaagccactctagaggtagcgaatcctgccacctcccccagcccccaagccctcagcagacatcgcaacatggtacactctcctgctaagcccaggtgcagcctcagactctgggagctggcctgagatgaaagcaggtctagggccttcctgaaataagagcttaaagccagacacgagggcagttcttcatgtagggacaaaaacaagggcagtccaacatgttaggaggaagcaagcaggaggaagtcttcctggaggaggagagactgcagctggccagagtctgccaggaaagctgtgtgaacaggcaggcaagcaggtgcagacctgagccaggctggcaaccacgagggttgtgaagtgggacggagtccacatcctgtgccctaccgtggagccccaggtggggccctagaccttcaggggccactcagcccaggacagtgttggtgggatggaggatcctctgcttcccccacccttcagagccaccccagggcacagaggcgagccaccaagagccaggaaactcctgtgtccacagtgtcaccagctggccccaggacccattctcagggatgctctggtcagaagcctctagatggtggcccaggaagatggagaagggatgccagaaccttgggggtttggatcagaagccacactttagtgtgactggcatttcccgagccactcgggatccagaaattcaggggacacagaaacatgaacattgacctgagtgcaccccatgacaatttgcaaagctacttcctgggcatcagctggtggacctcacagcagccctgggagcagggaaggaacccagtgccctctgagcagagggtccaaggctcggtgtggtggagagactcagcacagatccaacagtggcagtgtctgcatccaggctttgaccaccccttcactgcctccattgcaccgtgctccccgccctgtgttcctgcttccctgacgacatcagaccaaccctgcaggaggttggtcagtcacaggggaccaaggctggcaggacccagcactgggaagctgccacagatgccccaggcccccatagcatctccactggaaccattaaaaggcatcctgccagcaggtagccttctccatgggtctggagagcacaagggagccagggccctgaccctctggccgacccttggtcatgacgagctggctccatgatttctaatcaccagccttgccattaaggtgaaggaagcgcacggggaaatagcagattttatctccaacagatcgatctgctgagatccatctggccccagcctcttaattctccataatgtcaaagcaattttttgttaagtatacagtctgtcctctactaaattaaactaatagatctagtgggaaataaaaccccaagtgtattgagaatattaaaaataaaaaaaataaactcttcatgggtctataagatttatcttggcaaatgattaaataacacacacacacacacacacacacacacacaggggctgtaataaaatcaatttgggggtgctcagctccaccagtcacctccaagttctggccattcctctcctcttagtaacaccacccctcttaagcacctgggttcaaaagtggctgggctatgccctcaaataccccatgctacatcctcacatcaccaaagctagcaaggcgtatgcaccaacatgtggactgttgctgttagggccacaccccaggtgctgactgactggctctcaaaaccaatccccccattcacccactgcaggcagcaatgccagtacacccattttacagatgagaaaaacgaagctctgcaaggccaaggcaaagccaggatctgagccaacgtccatcagactccatagccctggaccccactctgcttcgttctgctttgctttgttttgctttttacttaattgtctatttggccatacacagcccaggccgtgaggcaggatcttgctttgatgacactcatcagagacagcgtctgggctttccctatagaacacagaggctggcacccaagggagggcagaggaaccaggaagggtggggcgaggcaggctggccctgggacttgggcacaggggcctgctctgaaacccacccaccttcactgcaccagatgcactgctgtttgctggggccagatctgcaggcaaagggggtggccagcagaggaaggtgggaggtgaggacacattaaatggtctctcctcagagccaggacccaataaggaggggtctgtggcaaccacgtggcttctgccctcagctcccagccaccgcccctctaggggatggcagtttcccagctcccactgccccctatgctgccatcagggtcagaactcctccttgtcaccaagtccaaagccttaccctgtcctgtcccccaatgccacttctgctgatcctgctttcttggagttttctctttgtcccagtgaagtccccagatctcctgcctgtacccccttgcataggcagctgcttgtctgggatgccgatgtaccctaaccccttcccacctagctcagccagattctactctgcacttaggcggaactcaggaagcctccccaggcaggacccactgctcacctcttcaggtggcccctgccagggctgggatcactatgtgcttagcttgattccccacgaggctctgagcctcatagccagggccacatcttgcttagctctgagccccgctcttctgggcacaggaatccttgatgtggctgcaaagccccagcttcccttgtcctgcctcctgtcccaccaagcccccctcgctcacaagccatgctctacccccatgtctcctcccatgggcttggcactcgtgtgtcctctgccaaaagcactcttccttccccaggtctgcctggctgacagccccagaccttcccccaccaccaaaattcccactacgtgcgggtgtgcaccgagcactgggtgaaatatcagacttagtttttgtttcttctctgggggtctgtctccacccgctcccgggtgcaaatccgaattccctgcaggcaggaagcctgtgtgtcttgcttatggcagcatcccctgcaccagcatatcatgagacacatgctagataaatgatcagtcttcgggacatgttggctggaaaaatgtctggggtgaaacaggccctgcctggagtttctcctgtggtgttcaccttctctagaccatccccaaacccaactgatcctgcctgtgacaaggaagcaaacagcccaaggctctgaagatgcagtgtgatggcaccgatgcagcaatgtcaggccagaccctggggcctggcagctgtgagtcctcttgctgctgctggccaacccctggctgaccacgagcaggcctgctttgccaagtgcgagcgcacacgggaaagggcaggctgcctccctgatggccctggtgacagcagggggccctctcttgtctccatgcaatgcagggactggcacctgctaccctcctcctggaactcagcactccaagttgctgaggacgtggggcaagcaagggccccaggaacccaaaatgtgagccgtttcacttgcccctccttccgtcttaggggcatcaatcactgcttccctctccagcagtacccagcagtccctgtcagggtccaggcagggccaggcctccacccctcgatgacctgatgtgtgcccttggaggggcgtcttcctgggaccggacttcaggccattatccctgacactggtggcgtgtgaatgactaaactggccaaaaataaaagcccccataaatctcctattttcctataagctgtcgggtacacagagtgtgctgggattattgatagaaaactttatggatgggctgcatcttaaaatcaaaatacattacccaaaatcaatgttgccgtacatggtacagggaggacaagaaaggtcatccgagacaagaatactgaaacccaactccaagaggacctgagcattaaaataaataaattttgaaagtgagttccaggaaaaacactcacttagggctgtaatttaagggtgctttcacaagaggctgggcagtctttttaaatagcgctttttaaagtgcctctgagagtccagtgaatccatccacaaaatggtattgacaagcaccccagctcacagccctataataacagctcatgataggtaatgagtgagagccccgaggctgggcacacagtagccaggccctggcagaagcaagccccccgggcacagccaactgggcagggcagccaacccatggccccatcaaccacattacaagaggatctgcctccaggtctctgtgcacagcgaccccacaggcattttatagctgtggatggagggaggggaaaaccgtgttagttcccattgatgattaatcaggactagaaacaaaatgatcatgaaatactctcaagtccatagcttcacataaccacgattcactgcaaacaggtcatctttgtaggagcccaagagataccacagtaggtagacctgaatggctgtgtccgcagagcttagtgtccctttgggagaagtgacacgcatgctcctccccagccaccttctttagagtctccaactgagagaccacatcccaccaggacttagtgagaaggaaatggctcccctgcagggagtggggagccaggcttggcagagactggcagggaaggaacccagtgccctctgactggcaggagctgcagtctggtcttagctcactaatcctccaactagccaaagggctaagtcgaagagacaaaatccctgccctgctcacagaaaacccacagcaaaagggaggcaaagtgctcctagcagggttccctgtccgaatatttgctaggctctaactatgggcaggcccagctgggagttaaagacacagagaaagccagtgtggtggctcactcctataatcccagtgctttgggaggcagaggcaggaggactgtttgaggccaggagtttgagaccagcctgcacaacacagcaagaccccatctctacaaaaaatattaaaaataaaacattagctgggtatggtggcgcatgcctgtagtcctagctacttagaaggctgagacaggaagatggcttgagcccaggggttcaagaccaacctgggcaacacagcaagacctcacctctacaaaaaattttaaacaaaattagccaggtatagtggtgcatggctgcagtcctagctacttggaaggctgaggcagaaggatcgcttgagcccaggcattcaagaccagcctgggcaacagcaagaccccatctctacaaaaaacattttaaaaattagctgggtatggtggcgcatgcctgtagtctcagctacttagaaggctgagacacgaagatggcttgagcccaggggttcaagaccaacctgggcaacagagcaagaactcacctctacaaaaattttaagcacaaaattagccaagtgtgatggtgcatgcctgtagtcctagctacttggaaggctgaggcagaaggatcgcttgagcccaggggttcaagaccagcctaggcaacatagcaacaccccatctctacaaaaaaaatatatatatattagcaaggcatggtgggctaatcctcctggtgtcagcatgataactctggaggctgaggtgcttgagctcaggacgttgaggtgcagtgagctaagatcgtgccactgcactccagcctggacaacagaaaaagaccgtgtcaaaaaaaaaaaaaaaaaaaaccatagtgaaggtgggtcagctgctctcatcacagtctacaaggcagggcagaaaacagatagaccaagctgaacagacaggaaagagactacaagtctagctcaggctgctccttgctcccatcagtcaagggtagggccttgctctccacaccaactcgaggcatcaggaccaggggctcacctggaggagggaagagcttagtgttttggttaagatccaggaccccagagtaagacaggctttgggttgatgcgtcactcagccacttactaactatgtgaccttgggcaagttccgtaagcttctgagcttcaaccataaaatggagtgaaatcaccatgtctacccctggagttgtgattgaggtaaaatgagctcattcattcattccacaagtatttactgagctcctactctgtgcccgaccctgttgtaggcgctagagatacatcagtgaacaaggcaggcacagtcttagagacctgcaacaagacactcaataaataaggatgtggtcccatgtgttggaagatggctggcgaaatggaaaaaataaaggaagcagagtgagggcctgggagtgctgggtggtgggaggagaggcagtgtagactgcagtgttaaatatggtggcccaggtgggcctcatggagaaggtgactgcttgacaaaaaccagagcacaacggagttagccaagcaagtatctgtgggagaagcatgtcaaccagatggtgcggctggtgcaagggccctggggtagaagcatgcccagtgtgctgcattgtaggaaggagaacagtgtggctaggggagtgtgagctatggagaagacagaaaagatgagaagatgaaggaaaagggtgagcaggaagcagaaaggcagatggtttgaccttggcagccactgcaaggccactggtgtttatgccaagtgaaatgggagccactgtggggtttttcagcagtggaagagggatctgatttccctgagaaggatctctttgtcatgttgagaactgatgcctagaaagtgtctagtacatggaaagcatgtgaaaacatgtatctgtcgctcttagagtaataccaactcatgcagtgggcaagaaacacccaaccccacaaggcggtacagggataaattacttccagataattccctctagctacagggattctcccacgggcatcgctggtctccagcattagcctctgcttggatctggcatcaggaaaggagactgctacctctccaggtgggccactgcgcagtgggctagctctttcttcagaaccctgcttggaatcagtccccaaatgagcctgctttcctggaaccccgctgtggtcctgaatctgcatagagcggtgcaagtctgccctctcccttcagaagctgaggacagcaatggggcctggcagggtcttacattcgggggtccaaagtggtttctaagggcacatgggatttcctaggaaaagctcctgccatgacagaaggagctggcaactgcctctgtggagcccctagagaggaacttgagggaaaggaggaaagtcctataggacccccttcttccctttgcccccagcaggagaccttagaaaacaagggcttgatagatgagccacagtgagccagggggtgggagtgactcctgggccatagacgaggaaactgaaaggcaggcactggaggcaagaagggctggccccgggcacccgctggcgaggacagccttggagagggcctgcagctcctcccctctgagctgtgctgcgctggccgcctggaccagggtggctgctggagagtgttttccctctgggtttccttctccttggctcccagggaatcctctggcggtgcctccgggaggctggtagccggggaagcaggcacgtgaatccaccgggctgccccaccccaacctgaggtcagagctgaggcgtaggggccggggtaggggcagaggtgccgaaacgcactagctggggactcccgggggaaggagataggagagacccaaggcgagccttaggactcgcccctatgactatgactacgcgctgcgtccgaaccacatgtccaccccgcatttgccttcggggaccagaccgcgctccctcagatggctggggagggagcagactccgggtgaaggctgggggaggtaccgggatgccgagtacgccagagcaggcgggggatgggttccggcttcctgccgcctcggcatctcgctttgcaccgggcaaagaaggggccacgaccggcgaagagcgcgtggagacacagggacccgcgatccaggggcaggaaccccgccccctcccggaaacctcccgggccctgagtcgtgcccggcgctccccaccccaccccacccccgccgcccctgccgtcactcacggccgctgcgggctggctagcgtgtgcgctctccgcgccgcaggcacctgctcgctgggcgctgtgcgctcacttctccctcgcgcactgcagactcccggcgctgccgccgccacccagcgtagtctccggctgggcacagcgttccgcccttctcgcggccccgggcgcccacccatccgtcatggcccaggcctgggccaaacagcggggcagctggttgcccaaactggggtaaggagttgagggctgggagctgcagagaggaccgagggacacacggggagcagggatgagcggccgtctcgagccgtgcagactgggaagaagccagggagagtttgggtgggaggactcccaacccaagcgggtgcggggcggggctgtactccaaccagaaagacggtggtccctccgagcgacccccgaggagagagggggagcgctctggggcgggggcggggcgggctgtggcaggagaggggagggcgggggcgatgcagcggtggaggcggcttggcgcccagccactgaccgccccctcccttcccctcccctccccctctccccgcctctctccggctccgggtccgccacgccggacccgctctccccgcgctgcgctgggtcggacgccaggtctgcgcgccgcggctgagcgcccactcgccctgcggaaagagccgcggaggaaccggcgggggcggctgcgggagccgaaggaggtggcaatcgggagcagaaccagaaggagacagggaggcagaagctcgcggctccgtggcacgcactccctcggccagggatgggtcccggcgcggcccagcccctgcccggcccgccgggcagagactgaaccgcggatccccaccgtcctgtggacgaccggacagagagaggcactgaccgatcgccagcagcctcccggtgggaccgcgtctcctgcacaccccgcgcagcgccccccgccggagccgcaccgggcaagccggcgagggagcggggctgattggcggccgccggcggccaggggagggggcgccgcgcggggccatggcaggctcggaggcgtcctagcccgagccggagccgatccgagcccacgcggccgccgcctctccgctcccgggcccccgccgccaccgcgccccccgcgggagatggaacagcggaaccggctcggtgccctcggatacctgccgcctctgctgctgcatgccctgctgctcttcgtggccgacggtgagcgcgggaactttgctgccgctgtggactcgggggggtctttgctggggccgccaccgagaagaagaagaaagagaacgaaccgggaagcttcgcggtctccagcaatcccgctgtgcagcctgggcccggaggggtagggagaggcgagcggcgaagggtcgccgcagcagcagcgccgcgcccgagtcgttcccagtcccgccggggccccggctgcggaaaggatgcctgcggggagcgggagtaggcgcgccccagccaggctctggcggtgcggccaggggcgggggagaagcacgagtcgcccctgccgccccgccccatccggagggaagcagtaggcagccgatggccggtccctgcctcggccctgcagccgcttccccgaactttgctagcccctccggccgtgcgccagggagcagctgcggggtggggggcacaaggccagccagccagagaccgactgcctcgctttaggttgccccaggcccccgacctacagctggtcacgcctctctctctctccccacccccagctgcattcacagaagtccccaaagatgtgacagtacgggagggagacgacatcgaaatgccctgcgcgttccgggccagcggagccacctcgtattcgctggagattcagtggtggtacctcaaggagccaccccgggagctgctgcacgagctggcgctcagcgtgccgggcgcccggagcaaggtaacccgccgcccacgcggtaccggcgcgcgcccggctcgcgcccggggcggcgaaggctaacccagggagggaagcagcgggcttcactcgcgcagggcgccgccctgtggcgcagcccatcttccaccttcgcatcccaaagcatcttcaaagtcagcagtggttacccccaaacctgtcaattattttgacagcatcgctgttcccaccacctcccagaactccattcacgcccagcccctaaagagccacacctcagcctggtcgcttgctcgtgctcgctggctgcggccctctgatgggtgctgggtagtgaaggaagcccccttggtcccatcaggctctccccgccctctgccactttgaggaccccagggctcccacggctgcgttccagaggccaccagaaaaccgagtaccggaaagccggcaggacctccagccctcaggggcacagaggggccacttctctgtggccgaaaacaggcccacgctgcctgtctgcctcaaaacccacactctcttacacactctagtgtgctcgcgtgcacacacacctacacacacacctacacctacacacacctacattctcccagggtcccacccagagttactcccactgagcctcccgctgggtgctgtccagacacagcggccctccctccagttcttcacggctcccagtgagctgggggaggattttgagccacgcggcagggcctaaggatgcccagagggaaggagaggggctttccttcccaccctggtgtccatccagtctccccagttcagccggcaggtgtgcaccagggcagccacccgttggtcaggcaccatgctagctccaaagcccgcttcctcctgggaaactcttggaaagccggacgtcctttgtgccctcaacccccatcccccgggcggtttcggtcctagcctgccggaggagggtgcccttgcctaaaggcggatccgagttcccctagccagaaggccgcgagcctcacgtctctctctccctctttgcattttaggtaacaaataaggatgcaactaaaatcagcgtaagtgtggagcccagcgcgggccgcgggagaccccttctggccgcctcgggtcccgcagctccctcccttagcaagccgcggcggccgcgcatgtggggccgcgcaagtagggcagcgatcgcagccttgcatcggtggctgctcggcgtgtccgggcgccatctgtcgccggttgcagggtcgggttctcttttgtgtaaatcaagggtccaaggcttgagtcccctaattcggctcggcgctgacctgtaaaactccccttggtcggactgcgcgcttagggcctctcgcgcctgccagcctccgctctgcgggcattcctcctagcaccgggagcgcgcggctgctcgccctcgccgcgaccgtggcgccagcttcccgccccctctgccccgccctgagcatctgctctgcgccctccgctgcaaccctttatcctccgcctggattgcgggtctgggtgcggggtgttgcaggcttgcaggggacggggtagggggtggttgtgccaggctgcgaggggcccgggtcatggggttgctaactctgggaggagatgcgcccaagcttcccacctggagcgtagaaaggcctggagatgacgaagcctcctcgtgggctcggttcagaggtgagggctccctgggtgtttgttgagagccgtagagcagtacttcccgaagtccccaccggggcgcaggggaggagcacttcgctggggggcttctggagatcccgcggaaaggcgggttggtagcaggtggccagggagccaggcagcagcctcagcgttgcttgccttcttaagaaagcacagtgttagctgtaaagggcggggtccggtgacagggtggctttccttaggaagcgattcgggcaggccctccgtgctccgggaggtgaggagggccggctggggcgggactgtcggttggagcgcgtcggggcgggaaagacgtggggaagttaaggaacaaggaatccagcctggggtttcctgaaggtgcaggagggaggaaggagaggtggactctgcccttctgaagcgccagctacgggaagacaagcagtgttggtttgtatgggcggggcagatgcaaggtgggcgtttggttaacgtgatggggacgtggggacacagtccaaagagctggctgcctggcgtccacgcagagttggaagccctatgccactgggtagacgcgggtgaaagggaagccggatcgtgatggtgggcaaaccaggatccgggaagtgttggggtgcgcggatgagggggcgcgacggccagggtggccagaagagtaggtttgggagctgcccagcccggcctctaaccctgctctcttgcagaccgtacgcgtccagggcaatgacatctcacaccggcttcggctgtctgccgtgcggctgcaggacgagggcgtgtacgagtgccgcgtgtcggactacagcgacgacgacacgcaggagcacaaggcccaggcgatgctgcgcgtgctctcgcgcttcgcgccgcccaacatgcaggccgccgaggccgtgtcccacatccagagcagcggcccgcgtcgccacggcccagccagcgccgccaacgccaacaacgcgggcgccgcgagccgtaccacctccgagcccggccgcggcgacaagagcccgccgcccgggagccctcccgccgccatcgatcccgcagtccccgaggccgcggcagcctcggcggcccacacgcccaccaccacagtcgcggcagctgctgctgcctcgtcagcgtcgccgccatcgggacaggcggtcctgctgcgccagaggcacggctcgggtaagggatcgcggagagggggcgcacgcgcggggatggcgcagggctagggctgcgccgggacgccccggggggctccggacccaggacccgccccctgggcgcatttgcatatgcatactccttcctagttaggtcgggagcgccccccccagggccttcttcccgcggtttctctgtctttactcctggcctctggaagcatttctgatgtgcatttatgaatggaggagggggctgccctgccagctacctcagggtacgctggaggctgtagtgtggggaggcgacctcttttgggtttggagaactggaccctgagggctgagctccgatggtggcaaggggccagtactcagccaccaccggtggtggaaatgagctatccccagatgggggcactggcacctgctggagagcgggaggcggttaaaacttgagttgcgttggtttctattttgtgtgctcgattgaacagactttgtccaagggtgtggaggggcctggctgtgtaacctacgccctctttggctaaatgcaggatggccctaggcagcagctctgcactctgctgtaaatcgcagatcctctccctttggctttggggtgggggcagtaaggactgagccctaagccactgttaggaaggcacccagaggggaaggcttgctttcttagggagctgagaggctgggagaagggattggggatggggggcgggatgtgagaaggcagaaggaggagaaaatgatggcttgactaccccctggtaggcagctctggggcggtaggagccattggcagaggcaggggtgggggcggtggggggcggttatggagggtagaaaggcttgcccagtgtgcccctcctcccaaggcatcccccactctctccccctgctccaagctgggcctcagagcccaccccagtgcctgactgtgagcaggttgctccctcccttggcccctctcctcagtcttgtttgatgcagagtcccacagggagcatctctcctggccacatggccctgggagcctggctttgggtacaggtgcatgtgaaacttcctagatgtgatggagcacattgtcacacccctacagtggtagttctcaaagggtggtcttcctgcaggctcctggactacctgcagaatccgctggggcaggtcttcatgtccttagtgtcaccatctcatcctgcctccctggctaactctcaagccctccgacagttgagcctgcagtctgcctggcacatcagttcagttctgtctctcatttagctctacccactgtagcagccgcctcagtgcgtctcaggctattggcttgatccgaaggcctcatccgtcttggatgccacacaggagcccacaagactgtccctcaggctactggggaaggtagggacctgcaaagagcctccacagcccagctgggaactttccaccctctgcactaagatatcactaggtgctgtgacaaataaaccccaaaaggccagtggcttgacacaattcaaatttaatattcctcgttcatatcaagtcctgccctggagtgccccagggcatgtggcggctctgttccatgcagtcatccagggacccaggctgagagtaccagcctcagcaggaggcttccaaagtcactctgggcatgacatagagccagcagaccagtgaggagagacagaagcagcccttgtcagctcactgccctaagagaattaagccctaatactctcaggcatgcattgtgtatgatgaatcaacttgtttcatatgcatttaggacggccctaagtatgtatcattcttgggagactgagaaaacagccactcaaatctttctggcagcgcttaactctctcagagaaaagctggtttagaaaaatggcaaggcgttttttaagggctaggtctagaagtggtaaatattacttctaccctcttccatcggccagaactcagtcacatggtccaacatggatgtagggcccgctgggaaatgtagtccttggtgtggcggctgctttcgggcctcatctcttcacagtgcaaggggagcgtgactcttcgaggagttagccatctctgttcagcatacaggcagtgctcagggagagttcctattgacttacagagccattggcttaactgatgcttgttggtgaagagaacatccttcttccccctccccttgggccccagcaaggaaatgtgtgcattacaggctgggacgtacctctaggatattcctggaggatttgaaaggcagaagttccgatgtaggttgtgcttccaccacttactggctgtgtgattttaggcaagtgacttaccatctctgagtcatctgtaaaatgaacaggataatctctctgacctcagagggagcttggtatggaaattgctgcacatatatgttcattattatcaccctggtcattagctgcactagctggagaggagaggatgggcagataaagctaaaaggttggcagttggaagccaggctatggagggccttgaatgccaagtggaaccagcagttggttaaagaccggtcaagaccatgtgaaatagatctttgagagtggacttggttgtgctcacaaaatgataatgagaccaaggtcatgagcgcactcctgcttgaatctccctcttcccttggccttcagcctgagtcccaggcccagccacagatgacctgactgcctgccatagccagtctgatctccagtctcggtgctggccatggaggctgaatgagagagtgaagatgctccaggacatctcatccagggaaggtgggccagtcagtgcccttcttcccagaagatatggaggtcctcaggtcaactcaatgctgatggcacagtgcccagtgccatcccagcagataggaccttgggcacccaccagccacggggccatatgttaatgcccatgtgggtcactctgccttccctggaggggctgatgtccactgccatctagaaagcacagcttgcctggatcccagcggggctgacagcagcacccctgggatagaagtacagtggcctctgaggtctctgtcaccccctaacccttgccagctcctgaactggccaggaactgtgtagacacatctcagaaagaacctccagtctctctccaagtctcctttggggtgcccagaaggtgggccttcagctgggaggtcagaaaacctgtgtccctcactctccaggtgaagctctcttgagagtggttctgctccaggcactctatgtcccactctgggcacggaaaatggatggcagacctgtcattcacaaacacatccgaacagccttgatgccaaggagggaaccatgctcagtcttgtgtcccacctcaccccggtcacccaaggccacccaggctgtgtgctgtcaatgtgaagcctgcagactgtgttttggaggatgggcattagtaacctttctgtagggctgcatcaccagccagtgccccgagctcagctgctggcaccaggtactgctgagcgccctgagaggcagcaagccagctgctttgctcggaaccacagcagcctgagctgcagagggagctcggggcagacgaccttgggccttgcctcccagccactcaattctaggcagcttgatggggaggggtccagaaaggaccgctgcctcttggttaatagtcaagagtgtttgcagaggatatcaaccagggtgctggcagaggcacatggaacattcaaacagggtcactgggggggatggaaagagcgtatgtaccaaggtgtggacagggttagggcagccaacaaaggattgatgcaggtccccggggctggcatcagtgggagccatcagcagacctagcctaaaggtctgggggcagctggtagcacccagagagtaggaggggaggcacacagccaacccacagtcacccagcaaggatctcactcctcctgccctccattccctgtctgggcctccctttggccaaaccctcctggaacctgaaggcaggggcacccaggtggtgcaggctgtagaggtcagccctcaggggctcacagcagagtggagaagggtgggctgaggacctgggggcactgaagaggctcatggccaggcacagtggctcacgcctgtaatcacagcactttggaaggccgaggcgggtggatcacctgaggacggaagtttgagaccagcctggccaacatgatgagatcctgtctctactaaaaacacaaaaaattagctgggtgtggtggcaggcacctgtaatcccagatacttgggaggctgaggcaggataataacttgaacctgggaggcggagtttgaagtgagccgagatcgcgccattgcactccagcgtgggcaacaagactgaaactctgtctcaaaaaaaaaaaaagaaagaaagaaagaaaagaaaagaaagaggctcaggacactggccatttcagattggcaacagcaggggcggtcccagtacatctccccaaatagtcccccattaagcgatcgttcctggaaggaagtcagaaaaaaagtccctattttttaagtgagccactttggtaatgccacgaaggagagaggggggacttcctccagccctcatccattagctaccgcacagccaggcaagaaagcccttcccatgccacatgtgtacctaatacacccaaatacatatttgcactaaaagttgatgtgcaaaaactcattcatttcacgtctcatttgtcaagagacattttggtatttgtgcttaaaaataaacatggactgcattagcagagcagagcaggcgcaggaggctgggccccgtcttagctgtgttcataaatctggctcctaattaatctgaatgctgacccatttttcgtgaacactttgttgctggttgccatttctagaaaagagagagagagaccaagcagagtatcttccagactaacacttctaaatggaaaaggcaccgcagtaaagtctagcgcggcctcaaaagaatccagtttgcaactgaatggctggtgtgttggccagaggttcccctctgcagggacgttgggatcagagcagtggcgtgtgaacctctaattagcctcagggctctggctccaaggaaaggcaccatggcccccacagagagccggctggatgtggcaagctgctgctgggtgcccacacggagaactggctctcaatatttcaattaataatgagagaaagacagccaaggccatgggtatgatggctgtagagaggctgtggctgctgggagccgtcaaaggggagcatccgcggatgtcgccatggcaaccgtaaaccgtgaccaaagggggccgtgggcaaggtggagacagtcactacatctcgacccatgccccggtggtgatagagctgaaggaatggcacacacgtgacccaggagaatcgcgatgcagcagagtcaccagcagtaccagcaggcccaggacctgtgggccctgagcaagccattgaggcagccacctggttttcccatctccccggacccacgaggacccaaaggccctcaccttaaatgaacaatccactcttcccccaagttccgatgtgacatgagaattataattaagaagaaaacaaatctggcaagggatgtcccagagaagagagggcgaggctctctgagcatcctgaaaaagaaaattaaaggatttcataaaggaaatggctgagcctcacagctggcaagcaatgcctgcttcatccctaacagcagcaatcttacgccattatcagcgacatggcatcctctcccccagcagccagtcactgggagccttctgggcccagccccacgcttgccataagggggaaccagagatggcagtgtggacccaaacttaaaggagccagggcacccaggtaattccaggacaaagcagtctgtgctgtgccagcactaatccagctgaggcaatcaggagaggcttcctgtaggtggtgtgtgacttacagcttgaaagaagcacctgaggctgaagtcctcccaattaggtcagaccttggaaagctttcagatgccccctctctccttcccaaggttggagaagtccacaccaaatggaatggcctttgtgtatcagtcagctcactgggcaaccatcctctcagcatcagcaagaccctaaattcaggataaaaacagctgctcttggattataataatgataaataataacatttgccttttactgagcacttactgtgtgccacgctctcctctcaccggctttcctccttcccacagttctccctaatgcctcctgcttcagtccgtcccccagaagacagagcgctctctctgtgcttatagccagagcccacactctctgcccagctggagtggtagcccccaagaaaagagctggaagccagccttgttaaatgtcaccgggaactaaccccccaacaaggagctgctcattaaacacgccaggtgcatatccttaaagctctgaatattaaggattccccaagcatccgtggggataaatgaggtcaagtgcttttgtaatatgatattgattagttctgctctgtgtggacagagcaaggccttggctgtggtctaaacccctgagctttctggaagatgccagcatggttttaagacatttttgcagcacaggagaaaaataaaagcattatcttttttattcccccatgcttagctgactatcaccaggcatctcttgtaaacttgtatccagagtggtgagaaggcttcactttgccttacataagggctgcagggaagtttgagatgggaagtcagcaggctcagcccctgtaactcttgattcctgactattcctgatgaagaatgacacacctccttccctggggtcgtgcttctagggaaattagcctgcttgtcagtggctttggtgctctcagggaagatgtgctataaataccaagatggaggatccagtctggcctcctgtgggttagggtgtagctgctgttaaacagccagcggtggaggtggctgcgggggctgcttgcagacagcagcaccctcggtgaccgcaaagtatgagcatagcccaggccccttctcctgcctgcatcctccacaggacggcccttgagagacagaccttgtgcaaagcctgtccctgccagcaatcctgtttctggaagttattggttgttctgttctgtcgttactgctctctgggctaaaatatcaaagctactttggacaggcttcagttggctctggttcttgcagttcaagaggaacgttgaggggtcctggcgttggcatgaaataaggagccaaagtggacatttcggaagcttttccccacaaccacccgcccccacacccacctactctcccgcacccacctactctcccgcacccacctactctcccgcacccatgggccctgctccatgcagctcagaagtaaccagcttgccagaagggccactgagagggacagagcaccccctaaaagtcccagttgagcacccaatgcccgctagagaccgaggccaggaaaattacctaggcagatcagtcctccccacagctgcccatgctggtgggagaaccaaagcatcacccgagggacactgaacatagttccggaggaagttacactcaccaccacttccaaccatcgcattctctcctgacatttcaaatgttcctcactgttcagcatgctggctcacaggtaagccaggatttcaatgccaacaaatttgccccctttctgggcctttacagggctctggccctgcaaaagtcacagcatgtgcttctcactcctgcccttcataccctaagtattatgcttgttttccggatacatccaaccatttgattggaatcttgagtccatcacttcccactctctctgtacgagttccgtcatctgttatcatcagcacgacaccgattcctatgccagagagtggttggcaggatccggggggataatccgtggaaagatgttagcttaacacagggcctggcacctagaatacactcagtggatgttggctttggtaaccagcgttattcacgggaatggtgttaaccatccaggatcgcttactaagctggacagggtgctccgatctgagacttccttcatgagaccgccctccctcctgcaaatgctgtgagcatgatggagctaattgtgattgtattcatccattttgcattgctatcagggaatacctgagtctggtcatttatagagaaaagaggtttatttggctcacagttctgcaggctgtgcaagcaaggcaccagcatctacttggcttctggtgaggcttcaaggagctttaactcaaggcaggggagtagacatgtcacatggtgagagaggaagcaagagagagagggaggatgtgccaggctctttaaacaaccagctgtcatgtgaagtaacagagtaggaactcacccattacctcattaccatgaggagggcaccaggccattcgtgggggatccactcccatgacccagttacctcccaccgggacccacctccaacactggggatcacatttcaacataaggttggaggggatgaacatccaaaccatctcagtgatggggctgatggagctcagaaacagaaagggccatcagattgcaaatggctcggagagttgctgtttttgtaagttctctggctgcaccatttcaaggggggaaggtagaaagatggggatggtgccacatccccatactagtctggttggggctgtttgccataagtcacgagctccttggtgaacaaggacagcttcatcatggtttcgtgtggtccatcagcaaattaaacccccaggtttgcccacgtgccgagtcctggctgtgctaacagggctcctggggaaagctgctccatgtcatgcctggtcgtgcttctttgtcatataggctgctgccagtggcgcgggcactgtgatgtgagggggtagggcctttcgggtggcaaggagaagctcagaggagaggctggtgtttgcagcactggacagctgtgtctccaggggagaagtggggagaaggtagaaagctctctcaccatgtcatatagccagagagcctcctggggtaggtctagactgagaggaggtgcccgaagtccccatcactggggcctttacagagatagagtgagagagagagtgagagccacctatgtcagggagtgccccacagggatgggccttttggggactcacgccaccgttacaggctcaggacatgtgctggttcttccacttgcgttcctgcattttgcttttcatgttcgcatccaccccagcttccctttccgtggctcactgtgcccagagattgctaataaaggtgccacttggcaccgaggctagtgagaagaatgcaggacagagataccacctctgggatgtgctgggagtgtaagcaggctgccggccaggccaggaagccagggcccctcctgcctgtctccacccctcacgcccatgtgagcctgcctccctcccagcacagacagcccactgcagactcctgctggaggcccacccacctgtaatcgtatagctctagagacagagagccttccctctgctgaccctggcctgctgtccatcagctgccctcagggaggaaggcatggttttctttaaggcaggaaagcccagctgcaatgtcagtccccttagagtgacttttattacaattgattctcatacaaatgccgcttggcccagaggaaagatctttaataaacccatggaagggggagctgacatcacatcaggctcagtccgagtggggggtggggattcctggtctgctgtatctggtctggcccaggccaaggggcagggagctacccagagcatcaggcagacctagcccctgccccaggtaggagctcatggtctagttatggtggccatgcaggaggatgaacccagggctcagctcaggcacaagaggggctcagaaatggtgggctaccaggatggactagtagttgggaagaactcagaaaggtggggccagggtgggctggtagttgggagaagacttcctgatcctgcagccaaaggagtttctttcattctgagcacctagatgtgccttgctgctgcctcagggctcccagcagttctttccctgtcctgcagtcaacacctggctgagtgccccatccagactgatgcccacagacagcaggcctggttcattctcactgctgtttccccactgtcctatattcattggacttggtactagttcattcattcattcaatcattcatccagcaaatgtccatggagcatttttttatgtgcaggaacttttctagtcactgagggcataatgtgattaagactaatgaggtcctgagaaagtgacagaggaagagacagatattgatcaaatagtcacatagcaagtggaaattagcagccatggctggtactctaaaggagaggcccatgggctatgggagctaaaatagggagatttgacccagtcagggaagggtcaccaagaaagtgacatttgagccataatcaggaagacagttaagagttggccaggtaaagaaagaaggtagagctttccaggaagagggactcacatgtgcaaaggtcctgcggcaagagggatctggggaaatgcaaaggcctcacagaagcttactgtggtgggtgcagagaaagcaagatggggaagcaaaggggaaattaagtcaaggttagagtttactggtcaaacagggtcaaactgtaaggccttttgaagagatcaggaagctttgactttatcctaagagcagtgggatggggtttgagtggctagggcatgatgccttcagaaatggtcactctggttgcaatgtggagattggagaggtgggatgaatttgatagatggggaagaccacttaggaggcagtgatccagtcaagagatgatggggcttggaatcattggatggatgggttgatggatgtctgaatggggtgataaaaacaagtagctggtgggtgagtgaagggaaggatgtgtgaatggatgggggatgaatgggaggaagaatgaatagatgggtggatgatggaagaatgaatggatggggagaaggaagaatgagtggatgagtggatgaattggagaattaatagatgggtggaaggaaggatgaatggatgggataatgaatggatggaataataaatggatgggataataaatggatgggtggacagaaaatgagtggatgggtagatgggtacatagaagggagaataaatgggtgggtagaaggatgataagttgatgggtagttgggtggatgggtagaaggaaggatgagtgaataggtagatgggtggatggtgggagaattattggatgggtggaaggaaggataaatgaatgggtgaatgagtgggagaatgaatggatgggtagaaggagaatgagtggatgggtagatgggtgggcagatgggagaatgaatgaatggatacaaggatgacgagtggacgggtagatgggtgggtggatgggagaatgaatggatggattcaaggatgatgagtggatgggtagatgggttgatggatgggagaatgaatgggtaggtagaaggatggtgagtagatggtagatgggtgagtggatgggagaacgaatggatgggtagaaggatgatgagtagatggtagatgggtgaatggatgggagaatgaatgggtgggcagaaggattataaatagatgggtagatgggtggatggactggagaatgagtggatgggtagaagaatgataagtagatgggtagatgggtgaatggatgggagaatgaatgcatagatacaaggatgatgagtggatgggtagatgggtggattgatgagagaatgaataggtgggtaagaagaaggatgaattaatgtgtgagtgggtggatggatgggagaacgaatgggtgggtaagaagaagggtgaatcaatgtgtgaatgggtggatggatgggagaatgaatggatggatagaagaatgatgcgtagatgggtagatgggttgatggttgggagaatgaatgggtgagtagaaggaagatgagtggatgggtagataggtagatggatgggagaatgaatgggtgggtggagggatgatgagtggatggatagatgggtgaatggatgggagaatgaatggatggatggatggattgatggatgagtagattgggaatgagtggaaaaataaatagctgacgcataggtggaaagaagatataagtgggtggatgggtgaatggagagtagaaagtaggagaaatgggtaagtaggtaaaacatggatggaaagatgggtagatttgggatacaagttgaggcttgcaggatgggtgggattgggattgcaggcatgcctaaggttggagtttccagcaactgaatactgcacactcatgtcttccaggaaggaggccataggaaaaaagtctccaagtggtggtaggtcccagaattccatgccattccatgcttctgcctgcagtccctaggccactgaacctagacagaggggaagggcagagtgagtggacacagccaatcccagcctgcttccgactcccctaatccctcagcctttagggacaggagcagcggacctcctccctctgctgggcactgggtactctggtggatgcagcctggcccagatttgctgattcttgtccacgtacaaattaatgtagatatgttttttcaggcatttaagaaatcccatctccaggtgggcagataaataactctatttacattaaagactaatgtaacaaaaatacaccaggcaataattcataatgcattctattctacagagtcatattttaatgtgtgacatatcccaggcagctcctctgtgctaatttcatttaatgagcacatgttatagaattttcagagcactatccctgggcaattaaaatatgttaaccttttggttaaattgtgtttctaaagaaaagtcctcactgtgaaacagaaagaaatatccaggtgtcactgaggtggaacccaaaggcggattgtaatgggaaaggactgctgttaggtcctgcatgtgctggctggagggacctacagcctcctcccggacctcaggccatgctgcaccatccctgcccttgcatggccaggcccatttccactgtgcaggacaaggagctgaagcctggacccatacagtgagcagccttccttgagcagtcattaattgactacccactatttgcctgacccaggagatccaaggtacaccctggctccaaggttgggaagattgtagcatggaggtgaggtacccccagacaactggggtttaaatagggctagtataggagacttcaaggaggggcaggctcctctctttcaaaatatggacaggtcccccagctctgccatctacataatgggcacaccagtgctccagcattcccaagtcccagagtttcagatctggaaggggctcttagagagcctagtgtgagtgattcccaaactgtgctccttagaaccccaggagccccaccccaacttcaaccagagccattctgcttctaatggttttacatattggggttccatgaagccattagttgaaaatagggttctactgctttaaaagatttaaaagcagtttatatagttctcctgtgtgtatatatatacctatatatatatatatgcacattatattaaatatatatttatgcactttatattaaatatacaaatagttttcatatatatgctgccttctaagggaagaatttgaagtggcttataaaactgaatgtgcggccgggcgcggtggctcacgcctgtaatcccagcattttgggaggccgaggcaggcggatcacgaggtcaggagatcgagaccatcctggctaacacggtgaaaccccgtctctactgaaaatataaaaaattagccgggcttggtggcgggcacctgtaatcccagctacttgggaggctgaggcaggagaatggcgtgaacccgggaggcggagcttgcagtgagcagagatcgcgccactgcactccagcctgggcgaaagagcgagactctgtctcaaaaaaaaaaaaaaaaaaaaaaaaaaaaaaactgaatgtgccataatagaatgaaaagtttttaatgagcaaattggaataaaaggaaaatgaaggtgaatttgtgaaatcatcttgagaaaaagttagacaaagacatgtgtactggcagtgttgggaagctggaaggtgaggtcaaggtcactcttgcagccctgggctccccagagggaactcgagacaggcctctcagccccagcttgtatctgaaggttaaaaatgcgaggccacctttgaaggacctggcccatgtctggtgcattatggatggttagaccagctgggatgtctaagaaagactttcattcatgcattcaacaaacattttgtgagcctgtcagggttccggcaccgtgctgggtaatgaggacatatgcagctgagacagccatggtctccactctctcaggcacacccgctagcagagaagacaggggtcagacagtaacacactacggccatccacatacagccccgaagaaatggaacttgccttggagcctgtaggacaaagggagcctccagactgggtcagcgagggcccaatgtctgaaggagacccatggtctgaggaggacggaaatgagtgaatgggaggtctccgggggtcggcagggtggattcatgatggcactgggaggcaggcaggggtgcggggagagaggtagccaggcgagaagagttaggtcttcagcctgagacagagactcctgggaacttggggagcaggaggaaattgtgctttgcatgtgaaaagagtactctgggtcgggcacggtggctcacacctgcaatcccagcactttgggaggccgaggcggttagatcacctgaggtcaggagtttgagaccagcctggccaacatggtgaaaccccatctctactaaaaatacaaaaattagctgggcgtgctggcacatgcctgtaaccccagctactcaggaggctgaggcaggagaatgacttgaacctgggaggtggaggttgcagtgagccaaaatcatgccattgcacgccagcctgggcgacaagagtgaaactccatctcaaaaaaagagaagaaaagagcactctgtttctgcaaaggacatggtttggttcttttttatggctgcatagtattccatggtatgtatgcatcacattttctttatccagcccaccgttgatgggcatctgggttggttccatgtgtttgctgttgtgagtcatgagtgctatgatgaacatacaggtgcaggtgtctttttggtagaaccaacctgcacatgtaccccctgattctaaaataaaagttgaaaaaagaaagaaaagaaaagaaaagaaaaacggcactctgggcagccacgttagagtgctgggctatcagtgactggcttgcgggggcttggtggatgcagggaggccagtcaggagctgctgcccccgcccaggtgagagctgatgcagtgagggggagggttggagtgccagggcagggtgggtgtggggtaatggcaggggcaggaagtagatagattcagagctgtattggagtcaacttgtgggggcctctgagatgggccagagaagatgggtgagcttgaaagagccagagaggaacaggaaaggaatctagcaaagggaacagactgagcaaaggcctgaattcaggagagcctgggtgcatgcagcccccagcgcaagagccccatttacctggagctcaagacactcaaaggagtgtggagacaggcaaggcggcactgtccactgggtgaaagggcttccagctggctaaggaacttggactcattcataggtaccaaggagtcactggagataaccttctaccacctacccactgtgtgaccttagtcaagtcacccaacctctctgggcctcacctatgaacgggaaagtggtttctacctcctaaggctgctgagagagataaaggggaaaattctcttgcaggggccgagtgcagctgctggcactgagaattgtgtgcctttttacagcccacaggctcaaaggttagcaatccagatggggcaggggcccctcaggtgaggaatgggccccacactgagggaggcagcctcgccgtccccgctggggagcccccacccccaccccggtgctcactgcagtcgggccgcctgcggccccctctgacagcagctgcctgaccacagagtaaaggcctgtttgccattcacattaagtgacatcattaaagggccattgggggcaagatgttatctcaaaagagatggaaaactggagaggaggtggcggcaaagttggccacattaaaaagccaccatgaatgttaacattcagggaaaaatctcatcccccattctccttcccttgcaagtagccaggggccagggtcaggctgaggcattcatggggaaggagagttccagctctttgggcccgagaggtggtgtgtgtggcagtggttaggtgtacacaggggccagactgcctgggtgcaagtcccagccctgctgtttatctcagtgtggccttggttgggctgccagatttagcaaataaaaatataggaccccccgttaaatttgaatttcagataaaccaccagtaacatcttatgaatgtaagtatgttccatgcaatatttgggacatacttgtactaaaaagtatccattgtttttctgcaattcagattcaatggagtgtcctgttttttatctggcaaccccaggcctggggcaaatcacttcatctccctggacctcagtttccccaactataaaataggagtaaaagtaactcctgccattacaaggattgaatttaacgtaggtcacatacttgctgcagtacctggccctaataagtgctggcaacctttgccttgttatcctaaaggtgctgggttctgtctgcttgactggtctggtccctgacatctgctcttgactagaggtcatcagttgcaacaccaggcaattgccatgtcctggttttgggtggggctgcttgctgggggctgaggagagagggaggccctaggccagccctctgacgcatgggcttcctccacgaccagagaggtaggacatgtgaggaaggcacttagggggtagcagaagagaagaaggcagaggcaaggggcacctaaacaaacagcacagacatttgtgccaagccctctgtgtttgggtgctcagggagggctgcctggaggaggcagcatctagacaaaggaaaagtagggggctagtcgttctgcggggtcagcctggatatgcctgtagggaaccagagcacatggctgcagcaggggaatggtcagattgaagtggggggatggggaattacggacaaaccccaactgcggcactcaggcagtggctctttctcctgtgggcagagggcagtcatcaaaggttctgtttctcagggagagtgtccaggtgcgtctgaaggatggagtggttatgaaggcaggagaatgctgtaggggccactgctgtcattgggcatagtggaggcctgaactggggctgcagcaggggagagagggcacagcagggaatggctaaaacaggcggggaacaggcagtccagccacatttgcccaggagtactcaggctccttccacgtcctggacacggaggcagccatctgggcatcatcaccaagggatatgacgtcacccccaggaggacagcttgtctgcaaacccaggagctgactacccagggcctggaagcgagggacagggcaggaggacctgtgcatgtctcgtctgctctcaaaggtccgcaccccacactggacttttctttaaaatatctcgatttcctttaaagcccaactgcatcagtggccccttgcttctgccccagttacagtacacattaattttatggcagaaactaattctacccgaactccgttagtgttcaattattcctcgctgactgcctttgaataaatatccatgaagaggcttttaataaaacatcaacaagggaggcagcctccttgcaaggtggcagaggttctcaccctgcagcgggctgggccagtgctgcgtccaggggagagctgggagccaggttctcagcagggcctgggagatcccgccagatgctcccagggtggggcaggctcaggagccccatcaggaagccgggaatgtgggagctaggagagccagccccctacatgaaggaaggggtgtgtctggccacacaactgcatggggacaaagataggatgcataccaggcctcctgggtcctgcgccaggcctggcacatagagtgcaaattcaggcacccacaaagggccaggttggctgagcaaaaggggcccaactgcgcaggaggctggggcaggactggcagctcaccctgggcccaggctggtggctagcagggagggatgaggggaaggatttctgctgggaagagcagccggcccccacccaccccagtgttctgtagcttggtggaaaagcagtcctggggttgctgattctggggcctttctaggaaatacctgaatctctgcttttatgtagaagtctcccaatttttacatgccagattataatttacaatttgtaagactctgtgtgcaccaaactagacccttctgcaaatcagacagccctcaggtggccacttggtgcctttaccttgtccctgggctctgtagaagacagcattttgtaaccaggaaatcagggagtggggcaggcagggaaataagaagactgaaaggccaggctctgggggagtcccaacgctgcccccaatgctgcacccatgctgccccaggggagctctagcactggccgcagtgctgccccaggagagcctgatacttcccccagtgctgcctcaacattgccccaggagagccccaacgctgcccccagtgctgccccaggaggtccctgacgctggctccagtactgccccaggagaaccctgatgctggccccaaggctgctctaggagaccccagacactggccccaatgctgccccaggagacccctgatgctggccccaatgctaccccagtagacccctgacgctggcctcagtgctggccctgacacgggccttggcatctggaccatatatgtctccccacagggaaaaggatggggtttgactgtagccaggatggctactagatgccctctcctactctcactccacaagcccctgcaaacccagagaaattccttgtacactggccccaggaagctcggagacggaggctcctccttcagctggggcatggccttctgctgcactcctgagcgggccccagggcaggtgatggggaattgggaagagcaggtctgctcccagctgccccaggcagacagccatccccatggctaaatggatgttcaagtccagcccattaaggccatgattgccccttgggggctgccttcttgtttcattcttagatgacagcaaaagagactagaaataggcttgaacatcagagctgaggggcccctatccaggaccctcagcttggctctctaacctttctagccaagaagcccttgttctgactaaagatctgttataagccaggagtggtggttctgacctataatcccaacactttgggaggccaaggcgggaggatcacttgaggccaggatttgaagagtagcctgggcaacatagcaagattccattattaccaaaaaattttaaaattatctgggcatggtggcatgtgcctgtagtcccagctactcaggaggctgaggcaggagaatcacttgagcctgggagttggctgcagtgagctatgattgcaccactgtactccagcctgggtgacagaatgagaccctgtcaatcaatcagtcaatcaatcaatgtgctatgacagcacaaaatgcagaacagacatgagtggccttgatctgcttgacacagaggagggacctgtctgtgagacctccatggttgtcctcatggtagaatatccaagcttgctgttggaatggctttgtctgaagacgacaatgtcttcccttgaactagctcttctctagtggctgcctgtactcggtgtgtgaatattctatgcaatactggacaaagcaagtgaaagacagaagcactacagcgtcagcctatgaaatgagcctccacttagccaggctgcaagagccagaccagcctgttgtccatttttgtgtgtagagccagacctcaaatgtgtcttcattttacttactcttctcaaacctgaaaaaaaaaaaaagcagcactgtttgcaaacccctgaccccagatgcagctcccaggccaccagcaggtttgcaggggcaagggacctggccaggcccaaaggatctcagccccagtggagagggctgcagctctcttctaagccacggccagaaaacaagggccacagactacagctggggcccatattaccccaaaggcagagggaagccatccatacttctagaaacatgggcagcagtggctgccctggcgagctgtgcaggctggtaagctgggagccccctactgtgatcccaatgcccacagggtaggagtggcccctctgcactccgttccacagcatagaaacagatactccatgccgatggaagtcccagcccatatgggtattcccaacccttctccccactctccaggaagctaactcacaggcttgggcagagcttgggtcagacgatggcctggaggaactttcacctttacttttagcacaaggcatgaaatggcttgagagctgccatattgctttctggcagggatttggaattctgcttttgcttgataaattgaaatgaggaatttcccagacaagctgctgggctggcacctttagtgtgcttatggtggggtggggggcagggggaagtagagatgcccgttgtgttctttgagggtctctttcaaatggctccagcgtgtctcttatcctgctcactatctgaatgataaaaattaatatcttaattgatatcttaatcttgagccaaagaagctttgattcctttaagaagagtgattagcaaaatgatgatacttgcttaatataaggaatgaatcagctactgttccatcagagggcttccctcacctctcaagcagcctgattttgcaccttaatcatgacaaataaacttgctcatgctccagcgctattcctggtactccttaggacaggagggaatagataaagaaaccattagcatccagtcaatgcatcagcctgcatgccagccagcccgctcagcacacaacccccaggaacacagatgtctccacgccatgtaaaaaaagaggctacagggatgggaatgagatcctacctcagtgagcagaacgtaccctctgggccttgccttgtagggtcaatttgggcctgggacctgtcattctggaaagcaatggacagcagaggccaagtgctggacattggaacagacagtgtgatcctgggcaacatccttcacttctgtggatcttgtgtcacatttggaaaaggaggcaatgcctggggagcaggtggacacagggctgcaagactcctgagctctgaaccattgctgatgtacagaccccacttactcagggtcagcctggaagccagacttccttggtctgccccgattcatttgggaaacctagattgtttatatgtctgatgaatcaggtagtaaaaggttgcaaatcctaggtccttcttttgccaaagatccagggatgtctcaaaataagtggttgaggaatcctgcataggcaactggggtaaccaggttctctcactggtactgacgtcgttggcaagacccatggagagcaaggaaaagcagggtggtgcggtggcccacctgggagccgcatggggcaagggaagcacctaccaccagccaagggagtcagtgagtgatcatgctaccttacccaggaaaccatgctatttccacagatctgtgaaacctgtgggtcaggggatctccctcatgagcccgtgccaccagggccttgggtcccaagcacgccactcagctagagactgcctaagactactgagttccggggagaggggcagctgtcatcactgaggctgcctgctgcctaagatggctaagctcccagggggaagggcagcagccatcactgcagttccagtctgctgcttttcccctgccagtactggggagactaggtggtttggacccaggaggaattccccacagtgcagcacagcagctgtggcagatcaaggtcagactgcccctttaggcctgacactgacccatccctcctcacctggtggggcctccctgcaggaatttcagcaactacagccaggcgtatagggacagagctctgatctccctgggactgagcccctcaggggaggggtgtctgcggtcttcacagatcagcagacttagtcttttcccctgctggctctgaggaatctgggcagtctggacaagtgagatcccccccagcatagcacaccccctctgccaaggggtagcaaaagtgtttcattaagcagatcccatgcctgctgaccaagaccccccacaacaggggtcaccatacaggagtgttcatgctggcatcaggttggtgcccttccaggatggagatcccagaggaaggagcaggcagccatctttgctgttctgtagcctccactgatgacacctccaggtatgggagaaaccccagtgaatagggtctggagtggacccccagcaaaccacagaagccctacagaagcggggcctgactgttaaaacaaaagcaaacaaacagaaagcaacaacaacagcatcaaccaaaaaagtccctgcaagaaaaccccatccaaaggccagcagcctcaaagattgaagctacataaactcacaaagatgagaatcaatgaaagaacactgaaaactcagaacgccagagtgcctcttctcctccaaatgattgcaacatctctccaacaagagcacagaatggggcagaggctgagatggatgaattgacagaagtaggcttcagaaggtggataataacaaactttgctgcactaagagacatgagaaaacattacaggagctgttaaccagaataaccagtttagagaggaaccgaaatgacctgatggagctgagaaacacaacataagaacttgacaatacaatcacaaatatcaatagccgaattgaccaagtgggggaaagaatttcagagcttgaagactatctcactgaaataagaccagcagacaagattagagaaaaaagaatgaaaaggaatgaacaaaacctccaagaactatgggattatgtagaaagaccaaacctacaactgattgaagtgcctgaaagaggtggggagaacagaaccaagttggaaaacacacttcacaatatcatccaggagaacttccccaacctagcaagacaggccaacattcaaattcaggaaacccagagaaccccagaaagatactccatgagaagatcaaccccaagacacataatcatcagattctccaaggttgaaatgaagaaaaaaatgtaaagggcaaccagagagataggccagatcacctacagagggaagcccattatactaatggtggacctcttagcagaaaccctacaagccagaagaaactgggggccaatattcaacattcttaaaagaatttccaacacagaatatcatatccagccaaactaaactttataagcgaagaagaaataaaatcttttcagacaagcaaatgctaagggaatttatcaccactaggcctgccttgcaagagctcctgaaggaagcactaaatatggaaaggaaaaacttttgccagccactgcaaaaacacactgaagtacaaagaccaatgacactatgaagcaactatgtcaacaagtctgcaaaataaccaaccagcatcatgatgacaggatcaaatgcacacataacaatattaaccttaaatgtaaaagctctaaatgccccaattaaaagacatagaatggcaggctgataaagagtcaggacccattggtgtgctgtattcaagagacccacttacatgcgaagacacacataagctcaaaataaagggatagaggaaaatttaccaagcaaatggaaagcagaaaaaagcaggggttgcaattctagtttctgacaaaacagactttaagccaacaaagatcaaaaagacaaagggcattacataatgataaaaaggatccattcaacaagaagagctaactatcctaaatatacatgcacccaatacaggagtacccagattcataaaacaagttcttagagacctacaaagagacttagactcccacacaataatagtgggagactttaacaccccattgtcaatattagatcattgagacagaaaattaacaaggatatttaggacttgaactcagctctggattaagtggacctgatacatagctacagaagtctccaccctaaaacaacggaatatgcattcttcttggtgacacatggcacttactctaaaatcgatcacaaaattggaagtaaaacactcctcagcaaatgcaaaagaactgagatcataacattctctcagaccacagtgcaatcaaattagaactcaaaattaagaaactcactcaaaaccacacgaccatatgaaaatggaacaactagctcctgaatgactcctgagtagataatgaaattaagacagaaatcaagaagttatttgaaatcagtgagaacagggacaatgtaccaaaatttctgggacacaactgaagcagtgttaagagggaaaattatagcactaaatgcccacatcaaaaagctagaaagatctcaaattgacaccctagcatcacaactaaaagaactagagaaccaagagaaaacaaactccaaagctagtaaaagaaaagaaatagttaaccaagatcagagtggaactaaaggaaacagagacatgaaaaatccttcaaaaaattaatgaatccaggagctagttttttgaaaaaattaataaaatagttagactgccagctagactaataaagatgaagagaaagaagaatgaaatagaaaataaaaaatgataaaggagatatcactactgaccccacagaaatacaaacaaccatcagagaatactataaactcctctatgcaaataaactaaaaactctataagaaacgaaaaaatttctggatacatataacctcccaagactgaaccaggaagaagttgaatccctgaatagaccagtaataagttttgaaattgaggcagtaataaatagcctaccaaccaacaaaagcctgggaccagatggatttacagctgaattctactagaggtacaaagaggagctgttaccatttcttcttaaactattccaaacaattgaaaaggagggacttctccctaactcattttgtgaggccagcatcatcctgataccaaaatctggcagagatacaaaaaaaaaaaaagaaagaaaactttaagccaatatccctgatgaacatcgatgcaaaaatactcaataaaatactggcacaccaaatctagaggcacatcaaaaagcttattcaccacaatcaagtcagcttcagtcctgggatgcacaaaacataattctaaacagaacgaaagaccaaaaccacatgattatctcaatagacatagaaaaggccttcgataaaattcaacatcccttcatgtcaaaaactctcaattaactaggtattgatggaacatacctcaaaataatgaaagccgtttatgacaaacctacagccaatatctacagaatgggcaaaagctgaaagtgttccccttgaaaaccagcacaggaaaaggatgccctctctcaccactcctattcaccatagtgttggaggttctggccaggacaatcaggcaagagaaagaaataaaggatattcaaataggaagagaggaagttgaactgtttgcagatgacatgatcctatatctagaaaaccccattgtctcagccaaaaagcaacttaagctgataagcaacttcagcactctcaggatacaaaatcattgtgcaaaaatcacgagtattcctgtgatagacaagcaacaatagacaaaaagagagccaaatcacaaatgaactcccattcacaattgtttcaaagggaatcaaatacctaggaatacagctgacaagagaagtgaaggatctcttcaaagagaactacaaatcactgctcaaggaaatcagagaggacacaaacaaatggaaaaacattccatgctcatggataggaagaatcaatgttgtgaaaatggccatactacccaaagcaatttatagattcaatgccattcccattaaactaccattgacatgcttcacagaatcataaaaaaaacttttaaaattcatatggagcccaaaaagagtccatatagccaagacaatcctaagcaaaaagaacaaagctggaggcatcatgctacctgacttcaaactatactacagggctacagtaaccaaacagcatggtacaaaaactgatacaaaaacagccacatagaccaatggaacagaatagagaactcagaaataaataagacgcacatctgcaaccatctgatctttgacaaacctgacaaaaacaagcaatggggaaaggattccctatttaataaatggtgctgggaaaactggctagccatatgcagaaaattgaaactggacctcttccttacaccttatacaataattaactcaagatagattaaagacttaaatgtaagctgggcacggtggcttatgcctgtaatccagcactttgggagaccaaggtgggtggatcacctgaggtcaggagttcaagaccagcccgaccaacatggtgaaaccccatctctactgaaaatacaaaaaattagctgagcgtggtggtggatgcctgtaatcccagctactcagggcgctgaggcaggagaattgcttgaacccgggaggtggaggttgcagtgagctgagatggtgccattgcactccagcctgggcaacaagagcaaaactccatctcaaaaaaaaaaaaaagacttaaatgtaaaacccaaaactataaaaaccccagaagaaaatccaggcaataccatttgggacataggcacaggcaaagatttcatgacgaaagtgtcaaaagcaattgcaacaaaagcaaaaattgacaaatgggatctaattaaactaaagagcttctgtgcagcaaaagaaactatcatcagagtgaacagacaacctatagaatgggagaaaattttgcaatctatccatctgacaaaggtctgatatccagaaactacaaggaacttaaacaaatttacaagaaaaaaacaacctcatgaaagactgggcaaaggacatgaacagacacttctcaaaagaaaacatttatgcagccaacaaacatgtatatatatgtatatatatataaagctcaacatcactgatcattagagaatgcaaatcaaaacctcaatgagataccatctcacgccagtcagaatggtgattattaaaaagtcaagaaacaatagatgctggaaaggctgtggggaaatagaagtgtttttacagtgttggtgggaatataaattagttcaaccattttgggaaacagtgtggtgattcctcaaagacctagaacaagaaatatcatttgacccagcaatcccattactgggtatttacccaaaggaatataaatcattctattataaagatacatgcacacacgtgttcactgcagcactattcacaatagcaaagacatggaatcaacccaaacgcccatcaaccatagactggataaagaaaatgtggtgtgtatacaccatagaatactatgcacccataaaaaggaatgagatcatgtcctttacacggacatggatggagctggaagccattatcctcaggaaactaatgcaagaacagaaaaccaaacaccacatgttattattaataagtagcagctgaacaatgagaacacatgaacacagggagaggaatgacacacactgggacctgtcagtggggaggttaggagggagagcatcaggataaatagctaatgcatatggggcttaatacctaggtgatgagttgataggtgcagcaaaccaccatggcacatgtttacctatgtaacaaacctgcacatcatgcacaagtgtcccaatacttgaaataaaaatttttttaaaaagaaacataaaaataaaaccacaatgagataccatctcatgccagttagaatggcaatcattaaaaagtcaggaaacaacagatgctggagaggatgtggagaaataggaacacttttacactgttggtgggagtgtaaattagctcaaccattgtggaagacaatgtggctattcctcaaggatctagaaccagaaataccatttgacccaacaatctcattactgggtatatacccaaaggattataaatcattctactataaagacacatgcacacatatgtttattgcagcactgttcacaatagcaaagacttggaaccaacccaaatccccatcaatgataggctggataaagaaaatgtggcacatatacaccatggaatactatgcaggcataaaaaagatgagttcatgtcctttgcagggacatgaatgaagctggaaatcaccattctcagcaaactaacacaggaacagaaaaccaaacaccacatgttgtcattcataagtgggagttgaacaatgagaacacatggacacgggaggggaacgtcacacactggggcctattgggggttgaaaggctaggggagggatagcattaggagaaatacctaatgtaggtgactggttgatgggtgtagcaaactaccatggtacgtgtatacctatgtaacaaagctgcatattctgcacatgtatcccagaaccttaagtataataatattttaaataaataagtaggtggttgaagagatagtttgccttgcttgttctagcttggaaaattttcctcttgagagaaggaaatccgcaacctgagaaagattattctccagcccttttaaagaagaagctatgtcacccttttctgtaacatctatttgcatggcacttgactctgtttgaggcgctgttgtttacatgtttgtattgttagcttttgatacataatgaaggaccccaaaactcaatggctttggcagaacaccacagccgtttttagctcaggattctgtggctcagcaatttgggctgggctcagttgggcgattcttctgctggtctgttgggctcattcatgtgtctatgatcggctgctaattcaattgaggccatgttggtctagagggatgtccactaggacatctcatggctcttatcctgcagcaggctggcccaggcttgttcatgtgacagtgggttctaggaggcacaagagagagggcaaacctcaatgcacaaacacttttcaggcctttgctcacttcacacccgataatgttccgccagcaaaagcaagtcatgtgaccaagcccagagtcagtgtgggagggcactatgatagggatgctgggatggggaagggggacttgtagccatttttgcaatcaaccactataatattgcttaatctggacccctgcccagtgagacatgccatgcacatattaattttatggagccatgcacatcccattttatgaggtaaagaatgttgccccgcgtcacatagcaagctggaaacaggactaggcttggaagcccatctctccagtgccagcccactgcaccatcccacttctcttggttccctcccaccccaacatcagtgccaggccagggagagaatgaagtgtcatccaggagccaaaccctggccacctgtacagacatccagcaacagagacatagcagaccctgggtgaaccctccccagacatcagcctccaggagccaatgctgcagccccactgccactgtagcccccaccctggcccagcacagagtggcaggctggttatttcaatcaacggtgttttgaaaatcttgcaatttaaaaccttttaaacatgagtaggtgaggctgtgatagtgccaatgactagttgggagtacttagaggcaattttaaatgtctcctgaaatctccatgccaacggtcccatggggcaccagacaaggttcacgttgccaggctcaccctcctgttagccatttcccctgccgctgcataccctgagggcttggagttccatgcacaagtgcatccacctttaaacacctcatgcagattatttctgtctcacctgcacctgccttcatgtcaggatttgcagaagcctaaagatcagagccaggggccaggcacaatggctcatacctgtaatcccagcactttgggaggtcgaagtgggcagatcacttgaggtcagaagtttgagaccagcctgggcaacatgatgaaattccatctctgctaaaaatacaaaaattagccaagcatggtggcaagcacctgtaatcccagctgcttgagaggctgaggcaggagaatcacttgaacctgggaggcagaggttgcagtgagctgaggtcacaccactgcgctccaacctgggtgacagagtgagactccatctcaaaaaaataaaaataaaaaaaatttaaaaaggccaggcgtggtgactcacacctgtaatcccagcactttgggaggccgaggcaggtggatcacctgaggtcaggagttcgagacaagcctggccaacatggtgaaaccccgtgtctactaaaaacacaaaaaattagctgggcttggtgtggggtgcctgtaatcccagctacttgggaggctgaggcaggagaattgcttgaacccaggagatggagtttgcagtgagctgagattgcaccattgcactccagcccgggcaacaagagcgcaactccatctcgattaattaattaaattaatcagagccaggagatctgtgaggcccatgggaccagtctggctgtgggtgaagtacccaggaggcagtaccctgctctcctggctggatccccactttccacacacccgagcctcagggaactccacccaggcacgtgggcatccatcagctcgtccatcacatccgcctgtcgtccttcccagtaatgcctgacagcaaagaatgagagcagattggagtctttgcagtgacaaacgcaggacgattcttcccacaaaaggggcccagaggcagagcaccagcctgagctgtgctgcaggagggccaggagggatgactgcctgaagcataaagatctggagaggaaggtctgcacacctggagttttgctgtcctaacgcttctcagccggggcccagaactgtgtgcagaagcgatggtctatggacaattcacctgcccctcggatagcaccacccactttgcattcggatgtttgaacacagcctgtgtttcccacagtggtcaggtggaatcctggactttcaggccagatgatttgtacaacctcctccttctacaaaaagaggatgatgggggccaggacatgaactccatgacacagacagctatggccagagcagggagaattaaggagcaggagacgccttggataggaaggactaagtgtgctgctacctggagagaggagagctgtgcattcaggcccagccttgtcagggaagcctcaagtctctgtttattaaggctggagggaaccagccatcctggctgcagtggtggagtgaaagcagccgagccctctgcactactgaaaattgacacagggtagggtctcccacacccctcctcacaggcacggggctgcagcccagctggtggggtcaagagaagggaggagagaggcctccggatggtgcagatgagcagggcggggctgaaaactgcatccattcatgccgctgactctaagcaagtagtgacgtcccccgggggttttggcagcaccaaggatcgtgcagggtgcttccacacttgctcctctcataaccctggagggagcatcccactttccaggtgagaagcccagggtttatgggtgggctttccccagttgcacgggaggccttaaaacaggtgaagaccctaaggaccgacggggagccaggcgggggaccaaggcgaagcagggtgaggcagaggtgttacagcatccatggcaggccaggggccaggttatgatcacactggagagacaggtgggagtgacccagaagttgctggggtcatttctcaaagaccccagcccactcatctccaccaacctgcaatttctcagctccacactgcaacccaaagagtggacagacaaggttgctgtggaaaaaagacttacacacagcaacatcaggatgccccagacagggtgcgtgggagtgtgaagctgtgcagtttaggcaggggcatggaggggatgccgggatgcacaagggacagaattgtgtgggatcgtgtagccttcatggaggaagaggacaagcagggccagaaatgatgaggacatttctgtcctcatgtatctggggagaaggaagcatattgtcttttttttttttctttttttgagacagagtctcactctgtctcccaggctggagtgcagtggtgcaatcacagctctctgcagcctccaactcttggtctcaagcgatccagccttctgagcagctgggaatacaggtgcatgccaccacacacagctaattttttattttttgttgtgatggggtctcactatgttgcccaggctggtctcaagctcctgggctcaagtgatcctccagcctcagcctcccaaagtgttgggattacaggcataatcaaccacacccagctcatatcatctttttattaaaataaggtaatgacttggacattagagctgtcactccccacttcaggccaggcgcttgtgtctgatctcactaggatcctaaagtgtatggtctgtaaattacaaactgcagcaacaaaatgcttaatcattaaaccaaggcagccactatgcaccagcctccagctgggtgctaagcgtgagtggccccagcctggggaagcctcactgttcctggtctgctgtgagctcctaggttcttgagactcaggtgttaaccttgcctgttttctcatcccctgcaggcaccggccgtagctacaccacagacccactcttgtccctgctcctgttagctctgcataagttcctgcgcctgctcttgggacattgacagacaagaccaacccgagcatctcagaggccgcacatgacctgcccggggccctcggtgaggaccatgtcgctggatggacacagagagactgagagacgcatgaaaaagtccacatggaaaataaataaatcatatttttgggaaagttacacaaatgtagaacacctaaaataatgcatctagtttccaaataatttggagtttggcccatgcagtctgcatgggaatcaatgatttctctacttcaatgtagttttcttttctacactttccctccaagtcttcattttgcacgaactgttgagcagttatctttaggataatatgtacaaatgttggggtcaaagccttttgacaaagcaaaatatttttagtagattattgtgtttaggatttttttttaatttactttttttctttgggggcttttcttttttattaaattatttcttttgaggcattttgattaaaaaagacacatcttatcataattaaaattcactgtcaataatatttatttttaaataaagattggaaacaaggtcagacacttgtttataaactgtattgtatattgctgaagaacagttgaataaaaaacaactttgaaataacctttctacagccatggatgaatgtcaagcgttggtgcccactgcagcctggctgcctgccgttccctcctgtgctctgacaccagctgcacttttggctgggtgtcacccggcgtggaggacagcccagggcacctggctaagaccacgctgagcagatgggagcacctgacaagcctcccctagggacagggcacttcatggaggcggcagtgagacgatcccccagcctgggtcctgaaggaaaggagatcgctaggaggaggtgtgaaataagtcaagaaccactcctcccccacttcgtttcaatgaatcatgcaattcattcgcccacttggagattgtaagtcaaggtgtatttactgtggttagctttgctgctagtttgaagggggaatttggagagaaagtagggcttgccacactccttcccgtgcatctgaagattgctttgagcctctgaaactcatagatttggggcaggttacacatgccctaaggaaacgggcatgccctgggtgggggctactatttatacttcattctaagacagcatctcattagatagctggagcccatggatttgtttaaaacccagccagattttaacacctgcagtttcaataagtgtggttgtcattgatgttgttcaccaaatacttccgttctccgctggccaggcccagggcaggataacgcttcctggcctcctgtggcgggtggggccacagctctggcgcatgagctgggaatagaagggatccgcattgcttctagtccaagacacaggattgctagtgcgacgccctccaaagcacttgtcctctaacgtgacgactcgcagcgttcacatcagcaagtgttcttccagcctaggtcgctgagtgactgcgatgaacacagcctttcctgtggccagcgctggatcctgcggccccatgagaagtctgccattgccgcttcacccactcatcttcgggcattatcgcagcataagccagcctgtcctgattggctcagtgtgtagttgattgactgtatttagctcaggggaggagtaattgtgcatttggacagtcccacgtgtacagagacccccaggatggagctgatgtcaggggaggcctgtgtggagagaacgtcgggacggctgtttctgatgggtacattaacttgtttcacatttcctttatattgatcagcaccaattgagctgtaagtttaatcactctgtctggtggatagtgattctgtccagaaggatcatctctttttatagttaactcaatactgcagcagctaatgtcatgtgaaatactggcccagtgtgctggagagcaaaccgtacttcccagataccagtggaacggggacaatgtgtcagtaagggtgacgttgtaccagatcgttccaggggatggagggctggggagtcattccccatcaccaaaaccagatgcctctgtacaaacacaggtagtcaggtcccagcctggaagctcccaacctttagcgtgatatgcacaggggaggggcaagtgtgatgggcacagtggagggggcaggtgtgatgggcacaggggagggggcaggtgtgatgggcacaggggaggggcaggtgtgatgggtacaggggaggggcaggtttgatgggcacaggggagggggcaggtgtgatgggcacaggggagggggcaggtgtgatgggcacaggggagggggcaggtgtgatgggtacaggggaggggacaggtgtgatgggtacaggggaggggcaggtttgataggcacagtggagggggcaagtgtgatgggcacaggggagggggcaggtgtgatgggcacaggggaggggctgatgtgataggcacagtggagaagctggtgtgatgggcacgggaggggctggtgtgatgggcacaggggagtgggcaagtgtgatgggcacaggggaggggctggtgtgaggagcataaaggaggggcaggtgtgataggcataggggaggggctggtgtaatgggcacaggggaggaactgctgtgataggcacaggggaatgggcaggtgagataggtagaggggaggggcaggtgtgatgcctacagcagaggggacaggtgtgatgggcactgaggaggggctggtgtaatgggcacagggaagggactgctatgatgggcacaggagaggggcaggtgtgataggcacggggaggagccggtgtgatgggcacaggggagggaaggggctggtgtgataggcacaggggagaagctggtgtgatgggcacaggggaggggctggtgtgatgagcacagaggagaagtggtgtgatgggcacaagggaggggctggtgtgatgggcacaggggaggtgctggtgtgatggacacagagaggggctggtgtgatgggtacaggggagggggcaggtgtaatggctacaggggaagggcaggtgtaatcggcacagaagagaagctggtgtgatgggcacagaggaggggctggtgtgatgggcacaggggagggactgctgtgatgggcacaggggagggtcaggtgtgatgggcataggggaggggctggtgtgacaggcacagggaagggggtcatgtgtgatggcatggggaaggggacaggtgtgataggtacaggggaggggctggtgtaatgggcacaggggaggaactgctgtgataggcacaggggagtgggcaggtgagatgggtacaggggaggggcaggtgtgatggctacagtggaggggacaggtgtgatgggcacaggggaggggctggtgtgatggacacagggtaggggctggtgtgatgggtacaggggagggggcaggtgtaatggctacaggggaggggcaggtgtaatgggcacagaggagaagctggtgtgatgggcacaggggaggtgctggtgtgatgggcacaggggaggggcagatgtgatgggcacaggagaggggcaggtgtgatgggcataggggaagggctggtgtgatgggcacaggggagggacttctgtgataggcacaggggagaagctggtgtgatgggcacaggggaggggctggtgtgatgggcacaggggaggggctgatgtcatggtcacagaggaaggagcagttgtgatgggcacaggggcgtggccttgtgtgatgggcacaggggaggggctggtgtgatgggccctggtgagaggaacaggtgtgctttggagaaaccagctttttctgcacaaagaggattcccctcaaacacagaaaattattcctaatatctgcctcctggggacagagaacttccaggtgggaagccgagcatgaggctaagcatgttccctgaaggggaggctgaacccggcctccagcagaagttaatggaactgagactggggctgtcgtggggctggaagccaaggcaaatctctggacccaggcttccatggagtggctaccagcattcccactggtccagggccccggacacaaagaaaggagaagttaagtgcacccctaagtatccgcagtgccgatccatggggtctgggctcctgttttctggggtctcacgcactccgagaatgaggacaaagaacacttagcctgcactgtgttttatggaatgcatacaaaccagaagagagaagcgccctccagaaacaaaaaccgtggcgtggtgctcactcccaaaactgcctttccctttggagtttgctttcagcctcggcagacatgggctggggttggagagcaagacaatttatttcagtttgggaagaatgcactgtgggcggcctcgggagctcgggtgcaggctgacaggacccccgcctgcttgaagggactgtggagctgtgggtctgtgtagcaactaaatccaaagtgagggacaggagtccagagggagtgcaaactccaccccagcccagagctgagtgacagcagggaagagaaggagggcagccagggtaggggcacgtggagaccgagccaagcccagacccctgtggaggagccctgctctgcctggtgatgaggattgtccctgattctagcccctcatgtggtgctgacccacctgcgccctccaggcagcggccaacatttaggggcatagcctggaaggaaggacaggaattcccagaatttgacaggaggtggtatgagcagagctgcagcattctgagtttcagttctgtttcaaccccacactcctggttacagctctggctcagaaaacaacagctctgtcggatccaagcctgccgttggttggaatacagcaaacagccatttgtgagctgctgagctcctggctaaagggacttctgcccctgccagccaggggaacagtttttttgttttgtttttttttttttttgagatggagtctcactctgtcgcccaggttggagtacagtggcgtgatctcggctcactgcaacctctgcctctgggttcaagcaattctcttgccttggcctcccaaataactgggactacaggcacccgccaacacacccggctaaatttttttgtatttttagtagagacagtgtttcaccatgttggccaggctggtctcaaactcctgacctcacgtaatctacccacctcggcctcccagagttgggattacaggtgtgaggcactgcacccggcgagttcttgcctatttttgcactgcttcttccagtgggcccatccccactttgggtgacactgggcattcattttgcctgcatttcagaggatgcaactcctgcttttcctgggggacaggtggccagaggctttgatgcatttgcccctatatgcatgcacacacctgtatgtagcagcctgctgctttagaacaccatttctttccttctcactaaggctgcagcagcaggagtggtgcagcactggtgaaacctcagccaactgggcgcccggtctccccagaatggagctgctgcccctcagggctccctgccttcatcagccaagaagagcctgcacaccctaccacagcataaatacaccttttacctcatgccaggggccctagaaacacatggaaaacccacgacctttatgagggacctgccccactttgtggctgcagacacaacatgaggtagagtctggaaacaccaccaggggtgaccccttttaaatgacaaagacccaaggagcaccaaaaatatatttcaagtcacagaaaacatgacttcacaccaagcctaacttgccaccaactagcaaagacccaacaaagatcacatgtgttccctgtacctgattgtttaaaagggagaaatggtaagtggactcttagtagaaagcatatatggtctcgtttagattttgaagttagaaaagattttttaaatgagactgaaaaagcggtaattataaaagaaaatatggaccgggcatggtgactcatgcctgtaatcctagcactttgggaggccgaggtgggtggatcatgaggtcaggagttcaagaccagcctggccaacatggtaaaatcccatctctactgaaaatacaaaaattagcccagtgtggtggtgcgcacctgtagtcccagctactccagaggctgaggcaggagaattgcttgaacctgggagccagaggttgcagtgagctgatactgtgccactgcactccagcctgggtgacagagcaagactctgtctcaaaaaaaaaaaagaaagaaagaaagaaagaaaatatagacaattttgactacattataacaaagagcactcgtttaccaaaaaccatcacaaagaaagtgaaaagagacttacaaaatacacccaagaaaggattactatcaaacatgtacaaagaattcctagaaatcaataagaaaagcaaaaacaggctgggcatggtggctcacacaggcgaggcaggtggatcacctgaggtcaggagttcgagaccatcctggcaaagatggtgaaaccccgtctctactaaaaatacgaaaattagccaggtctggtggcacatgcctgtaatcccagctactcgggaggcggaggcaggagaatcgcttgaacccaggagacggaggttgcagtgagccgagatcgagccactgcactccagcctgggcgacagagcaagttgactccatctcaaaaaaaaaaaaaaaaaaaaaaagaaatgcacaaaaagtacaatgggaagatggaccaaggatgtgaaccaccatatcatgggagagaaaatatggccagaaaaaaatataaaaggttttcagcctcaatagttacaagagaaatgcaaatcaaggccacagtgattatgcccacttaattatcaaaaatttaagtctgacaaaggccgggtgccgtggttcatgcctgtaatctcagcactgtgggagaccaaggcaggagggtcacgtgaagccaggagttccagaccctgtattagcatgacagcaagacctcatctgtgttagtccattgttactgcattgctgtaaagaaatacctgagtctgggtaaattataaagcaaagaggtttatttggctcatggttctgcaagctttacaggaagcatgattctggcatctgcttggcttctggtgaggtctcagaaagatttcacttgtggtggaaggtgaagtgagagccagggaggggagagccgtgaggagagagacgaggaggggatgggtgccacactcttaaaacaaccagatctcaagtgaactaactgaaggagagctcactcaacaccaaagggatggcatgaaatcattcatgagggatccgccccatgacccaaacacctcccaccgggccccaactccaacactggggatcacatttcaacatgagatttggaggggaccaacatccaaaccatattaccgtctttgcaaaaaaaaattaaagatagccatgcatgatggcaagcctgtagtaccagctactcaggaaggtgagacaggaggatcgcttgagcccaggagttcaaggtagcagtgagctgtagtcacgccactgcactccagcctgagttacagagttggaccgtatctctaaaaaactaaaaataaataagattctgacataccaagtgttagagaagttgtccatctccaagatcacctaagcattgactgtgggtgactgtgggagtgtaaatcgatacaacctcactggaaaacactttggcactaactgttaaaagtgaacattcacatactgcgacccagagattccaatccttagtagcaaaatctctttctcttgtgctctggggaacattaaaaaaaaaaaaaccttcaaggcagccccattcaataccctggaaacagatgagttcccatctataggagagatgatgcagatgctgtagacagttctcacaatgatatgaacacgacaccagctactccatcaagggtcaacgtgaatgaactgcaaggaacatgcaacaaaacactgagtcttagcatctattagtggggaaaacccccaaaaagggcagagtgctcacgtctgtaatcccagcagtttgggaggctgaggtaggaggatcgtttgagcccaggagttcaagaccagcctgggaaacatagagagactctgtctctattaaaaattttaaaaatgtagccaggtgtggtagcatgtgggaggctgacgtgggaggattacttaagccagggaagtcaaggctgccgtgagctttgacttgatagcaccactgcactccagcctgagcaacctagtgagaccatgtctcaaaaaaaaaaaaagaaaagaaaaaagaaaaaagccctgaagatgacatacagtataatacctttgtcataaagttaaatccaaactaaaaccaacagatagagggaggatggatggatggatggacagatagacttcttaagaaaacacgtagctaagataaaactgtcttcaaaggaaagcaatggaaaggtgaagatggatacaggatcgtggttaccttggtatggggaagcagaggtataaggagcccacaagtggatgaaggtcgtcatcaaactcttagttttcaaactgagtgatgggttagggtacatctcgtgttatcaaaaatgaatgaatggccaggtgcggtggctcattcctgtaatcccagcactttgagaggccaaggtaggtggattagttgaggccaggagttcgagaccagcttagccaatatgttgaaaccctatctctactaaaaatacaaaaattagctggacgtggtggcgggtgcctgtaatcccagctactcggaaggctgaggcagcagaatcacttgaacccaggaggcggaggttacagtgagccaagatcacatcattgcactccagccagggggccaagagcgaaactctgtctcaaaaaaaaaggggagaggggagaggaaaaaatgatacagtcctatccaggacttatattaaaacaaaaacaaagtaccaacttttcttttccacagtccccaagacaaattcacatctaactccatctcccacccagaggttgcaaactagcacttctcaagctgcatctggctgcagacatgctatgtttgacgttcacagggatgtttcttgttattttacaatatcggaaagtctcatgtaaacatccaaatttctcctgtcctctgcagcaacatggatggagctagggaccattattctaagtgaactaattcagaaacagaaaatcaaataccacatgttctcactgattagagagctaaacagtgggtacatacataacgacatgatgagaatgacagacactagggactccaaaagccaggagaatgggagggaagtgagggttgaaaaattacctatcaggtagagtgttcactgttcgggaggtgggtttgctagaagctcaatcccaaccattacactatatgcctatgtaacaaacacacacatatacttaaaatttgttttaaaaacccaaatttctggcttctcctgaaaaaaatataatatgcagccacacggggcccatattcctatgtggtgacaactggtgggtgccaagtaacagctgcccccatgatactccaggaggtccttccctggctctactctgccttcaccctctgcagcctcggccagctgtggtcactgtaccggcctcacggggccagaaaacattgccgccattcagagtgtttctcaaagagagctgaagcaaaagaagttttagggttaaccagaatcccattcctgaagcggtaattgatgttttcgaataacatgtatccagttttttatttaagaacaccacaaagaagttaaattagattgcagataacctgcgctttctttttctgtgcaagatttttctgtgcttttttattttggtaaattatagtatacaaaatgttctggttttgctttgaaagaaggtctgctgtgtgtctaaaacacaatctactaacatactcttatctgcataaccgattaactccctgtttgtgaccagacatctttctactccctaaataccaaaagacgtggccattattgtttaagcctccttcacggactcatttctaagccctttgatggtaaaattttgctccccgcccctgcacctccacctgccatggtttctccaaactgtgccctaatgaattggtgcttttaactaagacagaccacggtcacttttcaaaacgttaattcccataaaatgggatgtcagttttacaaggaaggctctcctttatcagcaaaaactgattccatttgactgattaattgtccttagaactgtcaaaggcttccagactagggaagacggcttgggaggaggcagacatgcagccttgcgatgtggggcactcctgggctggggaaaacaggagattacaaatgcacaaataattaattcaaatcaatacagcgaggggttcaggctgagagacattcaattaagttgctcaaagagaagatgctgatcttcagctagtcctctccatgctgcaaataatagagcatttttaatttgtgcagcagggatgttaatcttttgccatgtaatccagtccttggggaatgccataaatatgtggcactgcgcatgtgaggctccctgaggagggcactcaatcaacccagccctggctttcctgcctgtctgtatgtcaatctctcaacactcaattaggaaatatatgataggctaatagaggatggatggatggatggatggatagatggacggatggatggataaatggatatagaggcagagacagacaaatgttcaaagattatcagacatcccttacccgcctcccccacccataaacactttatgacttctggattttgcctgaaccaacagcacaaataaatcccaaggaattattcacatttcaaaaggattcacttcagaatgcctttaaatagcaagctcctatagcatgtttaaaataggatctgaatcccaattttattatacagagaaagagaagcacacacatacatatgaataatgatttagaaggttagacaccaaggtgttaaaagtttatgtttctatgtaagtagtattgtagatactttaatgtctgactgcggtctggcttctctgtgattattacttctgtaataagataaaagcagtaaagtatttttaatttaacaaaagacaattccaccccccaaaaaatgtaagcttcaatttataaagatgtaactctccacctgttttcagaagaacatttgctgtgtaaaaagaggctctccaggaacatgctatttagtcctcattcttcgataactgagcatgggggctctgagtacatcacttgggtggggagcttgaggcacctctgtggtcccctaccacacccactacaccaagagatggcccaccaagagttgtcctggtggcaaccaggactcaggggaaggagaggctggaaatgtggggtgcctctgggaccatggacctccaaagctctgcagcacctggacattaactacgtttattcattcagcaaacacacattgatcactactccataaacagccctgtatgggagaaacagataaagtatgcaaggatcaccccctaacccccggtaagggagctggtggtctggtaagaagaatcaacacctccacagctaagtggaatacaagctggactgtgagacccacagtagggatcttagcaagggactcaggaagggaaacaattcattgtaatgggtgggggtgggggagatagcagggacttatcaaatgtttgtggaaatgagctcaagtagcatttgagctgggtcttaagaggcctcctcgtctctccctgatgctcggagagtcttattagacacagacagctggatctcccctacaaccagagccactgtcgtttgggcaaaagtcaatccttcctcgccagcggctgtcaccagaagtggcagcctcattgcatctcattctgaggcgtgagagcctcagaaacaagagccagtgagtcttggggtatctgagccacaggcagcccgtgtgggagtctcggagcccactcaagagcgtggataaacctcgggacaggattgtgacaggcagcatatgcagaaagttgagtcagccctggagagtggtgcatcctgagcagctccagcaggcggtgcctgggagagatgggctgcaccgcgtgaatcagagggcacctgtcatgatggagacagatgtgtggggtaagccagccacaccacaaatcaaaaataacaaggaaaactctgggcaaatgaaactagagaaacgtcagctcttagccttgccaaagccgggctgctctgtgcacagagactcacccgagacaacagaaacagggctgggtggacgttttgcaaatgaatagtcagagagagccatgggttgcatttgttgacggtgtcagaaaactaaaatcagtcaaataaatgagaaatttgccatttcccccccaaattttatgaggcggggactaagaaaatgatccatcaagcaggaaatattttagctgttggtttttatttattagagaggtgtacagagtttggcatgctacagtgtacattttctacaaaatagaaatccataaaagccagagagaaagttgagattttgtccctgcttgttgctgtgaagttctccgtttcccaatgtatgtcactggtaaagatgaaaaggggaattttcactgtaagatcatatgcaaatgaccctcgagatgattcagccactccaatgtggaggcgtctactatcttcccacaacctggcttactcaggctttcagggctagagatgtgaactttagctgtatcctgactatagcagaatctttttgcaccatgcatgacattcccgcagccctccccgacttcaacccctgctggggtggaagcttctaggattgacccaggctcctgtacaggagaaagagatactcaagggggaaacccgcgcctctctgattttccctccagggcttcctctaagccatgttgcctgtttggctcaagatcaggctctgcggaagcacactgcagttggatggctcctggagggtcccacaggtgaatgtctgcatctccctgtccgcaggcaggtccttccggaaggcgttgtgcctgctcctcagtgtacagccacacccctgttgcccaagcagcaagctccatagcacatcctttcttggctttttcttcttccagactcacactctctgctccttctctcccactttctagactgacccccaaataaatgacttccccctctgtccttgccccaggctctgatgagaacacagactgtgcagatgtgtgataccagcatccatttccctcactggggcatagactcggtgtttccttggggaattaccatgctcttgttgtgcacagatttgagggaggcagatccaggagggaaccaaagtggccagatgctcacttccccatccccgaggccacctctgcgacaagaactgactcatgcccgagccaccagtttcccctggaggggagcaaggatgaggggagcagctcgctgccggtccccagggacaggggcttggtttgctgaactgtctctgctgtatggccctggctgtggcttctcctgcctggcccacccagctcccttggtgccacccagctcccttggtgccgcctacctcccctgagctcctgacacccctttccactaccaccaccaagagattctccccagtggaagggaacggggcaggttctgtgggtgccacccagatccccagctgacatggttagctgcagtgacagagccagctcaagccagcctaggctagccagggtagtatatcagtatatgggggagcttcatggaacccaagtgtggaatttcacctgcgcgtcagggtggggttatgatctgaatgtttatgtcctcccaatattcatatgttgaaatcctaaccctcaaaatgatggtacaagaaggtgagggcctttgggaggtcattatgtcatgaaggctctatggaattagtgtccttataaaagagaccccagagggaccctcactctttccatcaaggacacaaatagaaagcactgtccatgaaccaggaagccctcaccagacaccaaatctgctggtgcctccatcttggacttcccagcctctagaatggtgagaaataaatttctgttgtttataagccatgcagcctatgggattttgttatagcagcctggatggactaagacaccatcactacccagtgtctaacacatctgcttcatgcccctctctctacctaccggcttccttcacttagggccgcgcagctggtgaaaaatgacccactcccaaatattcgtgatacttgcagctacccaaagaaagggcgttcacctctttctcccactttctctctctttctctctctctcttcctccctccctccctctctccctcccttcctttcctccatttctctctctttctctctctctctctgtctctctcatgcatacagagagagagagagagagagagtcctaattcaaattcccagagaagcactcagattggcacagctcgggtcagacaaccacccttaattcattcagccaacgatgacaaggcacgaggagttatccagtgagactgccagccccaacccctaggactgccagccccaacccctaggactaccagcctcacccccactgttggagggaacagagagccaccgggatctgggaagatgctctaaaggatgttcaccacagcagcacttttcaacagtctccatgcatacgaatcacaggaagaccttattaaaaagcaggtcttgcttcactgggcctagggtaaggcctgagggtctgcatttctagcaaactctcggaggctgctgatgtggctgtacaggacccatacgttgagtagcagagcattccagattgggcaaggaggacatactcacccctcttcatctcaccaaggaagccacccacccctccttccttccaatgagagaaatctgtttgcttaactgcaaagattaaaaggaagccttcttgcttgttgagatatgataaggggtgagttgtcactgacattttgatgaggctttttttacaccgggacatttaacaaagcctacaaaccaaaccattaaatgttcagccaagcaattactttcaccaagtagtgagcaaatcagatcaaatcagaccccagccctaagcctcaccccatcatctgccagggatggtgatgggaacatcactgataaattataaatggtaattctacatctggacacagtacttttgccttgaccacatcaactggccacgtcaaagtggtctgtcatctgtcccacttgcccagtccccagagtcctcagctatttaccctgcgcccccagcctcccgtaaatctcaccccctgcagtcgtggtgtcttctgccttctttcaagatggatcctgatctgcagagaccctgatctgcactcatcataatgtgctttcccctccctggtctccatctgctcttgtcctgtcctgtttgtgatctcgattgccacaggtaccagccttccctattccaactgctctttgtggctgcagccagtgtggcccttcagagaccttcccttcttgctatcagtctgcaagtggccaaggtctctgcacaaggcaccccaggcctgggtcagggaccatttagggcagcagcaccatcttaccggtgaccctacaaactgaatgctacagtgcctgctgtgaggctgccaggtggtggaggtccatatgtccctttactcagagcctcagaaacaggcatatgggggccctggggggccacatggcactgtgttccggggaccaccttctaaggggaatcctgccaatgcagaagcaacacagccatgcatcaggtactcagcacttcacacggccactgtaccctatgttttggcccaccctctgcacagctgccttctggaaaagcaagtttcccaacactatccagagccagaattgggacccagaatgtgcctgtggtcttcacggaggttaatcttggatgtaggcctggctccggagccaagagtcttcttctgggcatccacgctcgcaaagtagcttgcaaccctcattagggaagcaacttctgagaagagaattctgcatccctgacctccacccagagaacccccctcctcaattcagcagcatggtcaggactggttcaatcgcgagtaatagaaaaacaactcatgtgactacaaagtgcaggcatggctggacccagggtgcaagcattatcaggcccaattcttctcctgtctcttggttctgccttccttggactgacctggctgcaaggcaggctcctctccatgtcttgactccaagggctcctgcctcacatattcctaatttagcagctagtggaatgggtccattggtctggcttgggttgtgtgccacacggagccattcacggtggtcagggagacatggtgctcttcttggccaggcatgagtcataagcctaacactagagctaaggactgagggtgggaggtggggctccccagagagaagttgaggagctgctagcaaaagaaggcaagcaaatcacaatttggctaaaataactaaacttttgggaataacacatagcattttgacttgcaattactacaaataatattacattaagcagttaaccaacagactcaagaaatagcatgtcctggataattccatatttctagttaatgtagttaagccccacacaccatactctcagattgctgaaattcttaatttgggttgacccagatgcagatcctgagattaggatttgagcaaaagtagtctctttgggaagtcatgaaatatctgcagggtagagggaaagtgagacagggaagggaagacaccctaaaaagggtgtgctatcaggccagttaccactacgggagattagaactaatccaacaggggaactgtattcacctgttcctacgctgctaataaagacataccagagactgggtaatttataaaggaaagaggtttaatggactcacggttccacatggctcaggaggcctcacaatcatgggggaagacaaggagaaggaaagttatctcttacatggtggcaagcaagagagtgtgtgcagtggaactcctatttatataatcatcagatattgtgagacttattcactaccataagaacagtatgggggatcgcccccatgattcaattatctccacctggcctgcccttgacatgtggggattattacaattcaaggggagatttgagtggggacacagccaaaccatatcaggaacactggggagactggaactaatcctactggggaatccaactggggaactccaatcctgggggagattgcaaaacacacctcagagctgtcctacccaagggatgagggaggtggggtattgatactcccactgctgtctgtcattattgaaagctgttcttggggctgctgacttcctggcacttctggcttgctgctcccattgacgaaggagccccaggcaaagagatgcaggttctggccattggaagtgggagtgacatgcacaaaagtgggaagggtgagaggatacagacagggagccaaccacatccactacaccaatttccaaagaataactatgctgaattaccttgccatggaggcccaacagtcactggagaatcatgtaactcctctagggctatcacaggaatatcattgtctgctgtgtcaagccctttacaaaaatatagttaataaagatttttgatagaccattgagtgaagtctctttatggtgtttaaatgttagaaatgtctgcttggagactgatactttatttcactttggtattattctcactaagaattttaaaacattttataaataacatggtctctaagtcatcctgagaaaagaaaactgaatttcaagtgggtttttttttttttagtcaatttcttttttaaaaagatccaaaccagttgcataaccttctggaaacaaagtcactgacagattgatttttgcacatttcactcaattgttctgacttttgactagaaaccgccacagcaaatgtaaacaccagcctctggtgggttactgtggccagtccacagagcttgtccccacttgttttcatcccaaagaaataaaaacagaggttaaagaaggaacactttgttctgggagagcccaagctgaggatctgatcattacacataagagtcatcccaaatgcaggccattaacctgacgttcacagggcactttaccgtttaagaggcaatttaatgtccatcatttcatgtgaccctgtgagatgggaaggacatgggttatgagttccactccacagacgagggaaccaggcctcaccaggcggggagttcatgaggttgttggaagaggtagaagccaaacgaatctctaaactcaccacgttctatggtgaaggtctttctgctaccctgttggtcccagatgttaggtttctcatgaattagtaaaagtatttgattgaaccatctggcattgccatttttatgggtcacaatgatcaaatacagcaaatttgccattttatgggtcaaaaacagtcaaacgttagcaatttcacatggtctgacctaatatgaaacaattggaaagctggttttggtgagcaagaacactgagaaaaacttcactattaatgccatttcagacgggaaggacattttaaccaaaaagataggaaggttgcatcttggcacacaggaccttgtgcttttgtgcttgctgtgctgtccacgttgtgctcattggaccaggtttgggagccagggagccatgtcactctggagtcttccgggctgactttctccctcatgaaaagaaaatgctaggggagcccctcttggggccaccgtcatggaaactctgtgctccagggatagggctctgattccggccccctccttcatcccattgacctgcctgccagccccactggccccaagaaaggaaagagggtggcaggtaggaggcagctgtcatctgatcctcaggtaaggcatggcaaagcataggagggctgcaaaagtggcaagcaatgtcatctgcctgtggaaccacccccaccaaatagtgaagattagatacacaagggagcaactcctccaatgcatctcacagcagaaagctgcaggctgagtaagagtgatgactcataatgcacaactgttttaagacaatacatttttatgtttttaaaaaaaaaaaatttgtgtgtttagtcttcccctgcaccaagctcaatattcaagtcaagcattttcaagaatgggccccacagatcatcatcttcactgcattatttctaattgcattattgcttaattgcagagcaatagagtgtgtaatttgagagctgtgatgcctggggggccagggatgatttaactttccatgcaaagcccagagctggggaaaactggcctgaagacagcagcaggggtacagcttccttttccagctgacttattgaatatctcacctctgccacatcagagaggcagctgagagcaaagaccccttgcttggatcacacctcatgctacccttgcagcagaacagcctcatgaagagacctgaagttcagaaatgatgcatccaacagtcattctatgcctgccactgggctgcatgagcaccaggaatgcaaagaaaaacagagcttggttcctggcaactggagagccagagtctagcaaaggggaaacagagctgtcaacagagccactcgatgatggagacaagctgaggaggcttccttgagaaggggagcctagacctagtctctattaaaaaaaaaaaagaaagaaagaaagaaagagaaagaaagaaagaaagaaagaaagaaagaaagaaagaaagaaagaaagaaagaaagaaagagaaagaaagaaaaacagaagaagaagaaagaaagaaagttaggtaaataagggactgtgagactaggtgctgaccagacctgcttcttttggatcccatcgattggttgagtgctgccagaaggagccagtaagtggggcggggtcggtggggggtgcagatatagagaaggggagaaggaaaacaaaggtgtgaatttggatgaagtcccagactcagcctaaccccgtgggaatctctggagtataattgcacctcagagtttgacctgcatgaaggcaatgatgctgggcttttttttttttggagacggagtttcactcttgtcacccagtctggagtgcaatggcgctatcttggctcattgcaacctccacctcccaggttcaagcgattctcctgcctcagcctcccgagtagctgggattacaggcgcccaccaccactcttggctaatttttgtatcattagtagagacagggtttcaccatgttggccaggctggtctcaaacgatgctgggcttttcttctcccaaccagtcgttgactatgggctgctctgagatacacaggtacttctctgcatgcgtgggaggaggctctagtgcccaagagcagcgtacaggaggttgcaggttgcaggtgcagtctattagcagaaagcacacagatgcttggggatagctgcaaggagttgataaaagtgatccaagaggatcaaggtggatacggcctccaatctgtaaatgccatgtgacttgaccctgaccataagatgtggatggaacaagatttgccaaattcagatctgcacttataaaccccagcacaattagccacttgacctgctctctttccagttagtgtaagtcctcttagttcttccttttcaaaatcattttagctattctagattattttacttgcacataaaatctttaattagctattttcgattcttttagttccacataaatttttaaactagcagatcagtttctgaaaaaaaaaattttttgaattttgattgggatcatgttgaatctgtagatcaagttggagacaattaacatcttaataaaactgagtcttctgatccatgaacatggtatatttctccccatttttttagatctctttaatttctctcaacaatgttttgtaggtttcagtccacaagtcaggtacatcttttaccaaatttatctctaggtatttcaaatatctgatgctatttcattattctaaatttaaatttcttattgttgatcatatatagaaagacaatgtacttgtgcatactgatctttttcttgcaacattactgaacttatttataagttccataggtttttttagattaattccttaggattttttccataggtgaagatgctatcagcactatcagcaaacaaagatggttttgcttcttccttttttaactgtatgcttgtttttttttttttcttttcatgccttattccactaactagagactctggaataatgttgaacagatgtgctaagagtgaacatcttgtcttgttactggtcttatgggaaaagcattttgctttttactgttaagtatgatgttagacttttcacagaaacgttttatcagcctaagaaaatttctctctattgctagtttacttaggatttttatcatgattggatattggattttgtcaagtgatttttctgtatctgttgagataagcatatgattttcctttttagcctggtaaaagtgaatcacactgatttatcatcaagtctctccttggtcatgattttttaagttctgttggaaccaacttgctaaaattttgctaagaatttttgcatctgtgtttatgaggaatctctgtagttttcttttcttatagtgcctttttctggttttgagattagtggtaatgctgacctcatagaatgaattaggaagtattgcctcatctttaatattctggaagagtttgggtagaattgacattatttctttctcaaatgactcaagccacctgggcttggaattttctttgaaggaagatttctaactctaaatttaatgtcattaatagatatagggctatttgggttatctatctttttttaataagctttagtcatttgtgtctttcaaaaactttgcccacttcatctaaattgtggggtgctgagtgtttttcctgattacctgtgtattacaaggtctctccattctgactattgggaatatgacccagcccagcccttgtgatttccagaaattgttctacctttttctttccagcgttttttcactggcctcaagcagcttcctcatatgcaggcattgatgggtactcagcagaagacctgagtgggaccagcagatctctgagcactctccacaccacactgtctctgcaactcaaagaaaccactagactctgtctggacacccaggcacacccccatccctgtcctggaatctcgctccagacagtgagctcaggcaatccaggcctcatcccatttgtttcctttctctcatgagtcactgccttatgctgccttttgatcaatgtctaaaaagagttgtttcaaatattgtatctgcttttttagttgtttatgatgggcaggtaaatccaatgcctgttaccttatcacagccagaagcagaaggctactctggacattttgaatttgaggttcctgcagaataccaaactgcagatatctagcaaactgttgtaagtaatgagagaggttgcgaccagagataaattttggaagcaaatgcataaagctgttagctaaaacacagctggagggagcttctagtagaggaatgatggcatcttaaagacaaaatccactggagcagggtagacacaaaggagaacatgatgtgggaaagcagaagaaagtgagaaatacatgagaactcactgaagaaggaggtcgtggaaaccagggcttggagagtttcaagaagctgaaagtatccacagtgcctaatgccccagagactatgggcatgatgttgggaaggcaggctccaggcacgatgccatcatgctgtgagtgcacctgtactgttgcttcgtgtgtgctggccccactggttttgctaatgtgacaaactggtcccctctgccagagaagattgaggtggggtgagtgaatgagatgggaagaatggcacagaccatactttcacaaagcttggttgagaagggagggagagtagtagctagtagtagtaccagaagaccagggcaggcagtggcaaaatttcttagtttcaaagtcttaagcctgtgaacagtctaaggaagaaaagggaatcgtcagatagagcctgggacagggaaggaagagagttgatggggcaagataccatgagatgggaaggggaaagagttttgccctgggcgggagaaaagaaaatgagtgccaaagtagaaaaggtttcagatgagataacaagtctgtgatccaaccaccactctccctatttaccaagagagtttgacaacacacaggcaggtcacatgctagcctgaaggcagcctagccacagcctcagattggttcccactagctcaagcctgcaatgctgagaactgttttcatagctggtggcaggaagtcccataaatgcactgaggtcacaggcatctgtgcacagtgctcaagaccacagtttagggctgccttgagtcacccaagtgttgtgactcatacaagacactaaagaaatccatcttccatagcatctgtacctgaagcattaggttccacatagcagagggggaaacatctcgtttctttttcttttctttttttaacttttattttagattcagggcgtacacgtgcaggtttggtacatgggtatattttatgatgctgaggtttaggatgtgattgattccatcacccaggtaatgagcataatactcaataggtggtttttcagcccttgcccccctccttccctgctgtaggagtccccagtgtctatgtttgccatcgttatgtccatgagtccccagtatttagctcccactcatcagtgaaaacttgcagtattttgtttcctgtttctgagaaaattcacttaggataatggcctccagctgcatccagctggagaggacctaattttgttctttttcatggctgcatagtattccatggtgtatatgtatcatatttttctttatccagtacactgttggtgggcacctgggttgattccatgtctttgctattgtgaatagtgctgcagtgaacatacgagtgtatgtgtctttttggtagaatgatttatattcctttgggtagacacccagtaatggaattgctgggttgaatggtagttctgttttaagttctttgagaaatctccaaactgctttccacagtgcctgaactaatttacattcccaccaacagtgtacaagcaatcagttttctctacagcatcatcaacatctgctattttttgactttttagtagtggccattctgactggtgtgaaatggtatctcattgtgagaaccacatgatttctacaaagtatatctactagatctctcacggttgacagaacttggcaatctgaactgctttaagccaaagggggatttatagggctggatgcagctgcagctgtatctagaactcagaaattccaagtcctggcctctccctccatctctcaggtctgcctgatgcacaggtggctacatatagtggcacgtcccccagctttacaacagtttcagagttggctaggcatggtggctcacatctgtaatcccagcactttgggaggctgaggtggaaggattgcttgaggccaggagttcaagaccagtctggacaacatagcaagtccccatctctactaaaaataaagaggttagccaggtgtcgtggtgcccacctgtgatcctagctacttgagagtctgaggtgggaggatcactttagcccgggagattaaggctgcagtgagccattgattgtaccaccacactccaacgtgggtgatagagtgagacccatctctagaaaagaaaagttccagagttgatccatcctggctctgtgtaccagggggtacaaggtacaggtacagatgccctgcatggatcatcctgaaccaatcaccagggtgagagagactgagtgtgctgacttggtgagcccaggatggaataagcctcaccagatgcatctgggctgagagtgggatgggcagatcctcccgcaaaaatcagacaagctattattggagaggaagcagatgccaggaggccaaactgatgtcccctgcaagaaatctgcaggggcccaccccaaggcaacagctgtgggaggactgccccaggattggagcacacagacccaaggaaacttggcccaaatgtgcttttgtcttggaatttcatcttcacagggtatctgtgtgaaggagagacatggcgaggctcaagcttggaagatgtacatgtcattctggaaacacttgtgcatcattatattagtctgttctaacactgctgtaaagaactgcctgagactgggtaatttataaaggaaagaggtttaattgactcacagttccacatggctggggaggcctcaggaaacttacaatcgtggtggaaggggaagcaaacatgtccttcacatggcagcaggagagagaagaataagagctgagtgaagggggaagccccttataaaatcatcagaccttgtgagaactcactcagtatcacaagaatagcatgggggaaaccggccccttgattaaattacctcccaccgagtccctcccacaacatgtggggattatgggaactacaactcaagatgagatttgggtggggacacagccaaaccatatcaatcatgtatgctgagaaaaaccattttcattagcttcccctcgaccttccatgttgctgcaaatgaacccacagttccatctcgaaaattcaactggaactattccctttgttaaataaacttcatttaagggctgactgccttgggccctgggagaaaatgcatctttgcttttgctgagaccaatctaggtcagcaaagcaaaagctttgtattttttagagacatgaactgcagcttagatgaagaccaggggaagcatccactctgaaggtgcaaagtggagaaccgcaagtagtcacagtgggagcaggctccagaggcctcctgccgcctcccttgcccctcagccaggaaagccctttgaaacagagcatcctgcttttgcaagccgcaccagcaatgtcttcagggcagtctcagagtgctccctgctgcctggggcctgaagcagcgctttccaaagtagtttttgcagaggctgctagtttgttcaggagggagaacagacatgggggaattgaggtctctgttctccacccctgtatccttttgctagcaggagacagccatgcagtagccacctccaaaacggtccccagtgacccctgcctcttggtattgtggtcctctcccacaaggagtaggactggctcatgcaacaatagaacattgcagaaattgtggtgtctttggagagtcgttcatgaaaaacactgcagctcctgccttgctagctcttggatcatccactctggagaagccagctgaagatatactcaaaaccatcctcaaatcatggcaaggaacttaggactcctacccacatccctgtgtaggggccatcctgggactggatgctgcacccacagccaagcctacagatgaacaaacctctggctgacatgtggactgcaagttggaaaaccctgaggcaggactactcagttaagccattcccaacttcctgacctgcagaaactgagataggaaatgtccttttaagccactacattttagggtaattggttgtgcagtaataaatggtaacactccacttccagatgcaggcgaacaagtcttgtctcctcattatcccccggtacttgaaagacttgctctcactcactgccctgatctcaccctgctgggcggaagcttcctgaaggcagggaccaggttgtaattaatcattcttcctatgtctatgtccctaatatccccacacactgtaaatgctgcatggacacttactagattcacttgaatttctgtctttctggatgagagaaatcctgggagcacagctgtgcttctttctcccagaaatttccttcctcaactcaagatgagaaatacagctttttaattaacagaaactatctcaacccagatctcaagtcatttgatgtgattcggggactgcttcttgcagagacaacagttacttgcaaaaaaagcccacaagtcaatgcaactgatttcaggaaattgggtccagcaagcagcctccacatccaggagggacctcactgcagcacggatgggcagcacatgtctgctcagccaactcactgtccctgctaagccacaggcttccagccacctgctgatcagcaaggactttacatgtgtcctctacctgcctgccactctgccgaggtgtccaacacagagccccggtccccaagaggctttcattcggctaagcaagatgttcatgcagaaagatcagctacacttaaatctgaattcacccaggattggttagtgtgtcattgactaaatggtcttggagaactgagaaagggatctttgttcagggaaaatataccacaacctcccctcagggcacaggaacctcaaggggttcatggtctaatggggaaagctttccacagagggaatttcaaagggtgtgcagggagtggctggaaaggaagaaaggataatccaagttgttgagtcttcatgaacaaacagcccagagagacagaggtgacaaggagtctgtcatgacccagcatgaagtgtaagatggagtgacgagacataaggttggggcacaagccatggggatgttggtagataattcataagtgtctcacatttctgcatatctcatgagcagaggcactgttggcccttgtggtagactatcttttcaaggctatttatacagtgaacagctttggaagatagagacagatttgcaaagggcaggcacactgacagcccactatttaaaaagtaagggacactaagagttccttgcctggaacgaaacccctacatgggaagtttccctcagccctctgcattgccctggggagttagaactcagagaatcagtacacaaaaatgctggtactctactgcttttgctgtgagaataaagccctttgtttctgacccaggagccttgtgtcttccgtcagcatccatgaaactgtggcagactcacctgtcagcttgcaaaaagggtacaatcacagatctgtctcagctcctgataggagaaccctgaattccaggttttatcctgctggtccttgagtggagaaattacatttgcctttagctgtagaagggtgtcattggcgcctgtaatcccagcctttgggaggctgaggcaggaggctcacttgagggcaggagttcaggtgaaaccccatatctactaaaaatacaaaaattagccaggcgtgatggcaggtgcctataatcccagctactcacgaggctgaggcaggagaattgcttcaacacaggaggaggaggttacagtgagccgagatcacaccattgtactccagcctgggcgacagagtgagactccattggagggacatttgttggattttttctttttttcaaaatgtgcagaaatctgttaaggataaagttaaatttctctgacctttttttctgagcaggaattgagtgaggagtctacaggttagaaagaggagaaacctggtgtgcctaagagaaactagagaaggagagcccgagactcagggcccagggccactgcctggagggcttggccaaacttgcctctcagctatagctgacagcctcctagtctagatcatcaccttcctctgcggacatgggggtctgaacctccctggaaaatgtcttaggaagctcaggaggccacaataaaataccacagacagggggcttaagcaacagaagtttatcttctcacagtcctggaggctggaagttcaagatcagggagccgatggccattgtgtcctccacggcagagagagcaagcacacactttgctgtctctttttttttttttttttttttgagatggagcctcactctgttgcccaggctagagtgcagtggcatgatcttggctcactgcagcctctgcctcctggattcaagtgattctcctgcctcagactcccacgtagctgggactacagatgcctgccaccacgcccagctaatttttgtatttttagtagagacagggtttcaccatgttggccaggctgatctcgaactcctgacctcaagtgatccacctgcctcagcctcccaaagtgctgggattacaggcatgagccatcacactggctctgctgtctcttcttaaaaggacactactctcatcatgagggtcccaccctcatgacctcatctcaacctaatcatctcccaaagaccccatttccaaacaccaccacattaaggactagggcttcaacataggaatttggggaaggggcacatttcagcccatggcgggctgtcctgatgcctaaaagctcccaggacactcacacctactgacttatcccacagccccaagggactccttacgtcctcaagccaaggggaacctccagcaccggcaggctcagcctcctgccgctgggtggggaatggcagcattattgagagtgcatgaaaaatcgcaaggaggcagaagcccacctcacctcttccctcaagcacccagtgcaccctgagggtcaaattggtgacatcatctgaacacattcccttttgagctcatctaaacctaatgtcttacctttttggtcccactacaaataacacctggttattacaacaataatttctgctggaaaatcccctaccctgttgcagtcaaacgggcaattggaaaacgaaaatgttagggtgccctagacccaggagtcatagatattcttccaagacaatcaacatcagacaaatgtggtaaagaggtgagttgtcacgggtacgggatctccccaacttagtgtctgataatctagaagtttcagcaaaaacctgctcctagaaaagctgccagagcaatggccatgctggactagagtccgtgattccagctggacccactgtctgtggcggccactcctcgtctgaagggcattgtcttgggtcaatgcggcaaactccacagcagaggcgttgacacctgagaatcctacagcccagcgagtgaggctgttccgatccactcttcctggccagctgtcaaaacactctgcacctgctctcggaccataacaagtattactcatgaaggtgacagttcctcaggcccacagtaataaagacacacacacacacacacacacacacacacacacacacacacacacaggcatttaaaaaaatgcaataggtcaacaacactcaatctaaaaccctaggggctgggcacggtagctcacgcctctaatcccagcactttgggaggctgaggtgagtggatcacttgaggtcatgagttcaagactagcctggccaacatggctaaaccccgcctctactaaaaatacaaaattagccagacatggtggttcatgcctgtagtcccagctacccaggaggctaaggcatgagaattgcttgaacccaggagggggaggctgcagtgagccgagatcacaccactgcacaccagactggataacaaagcaagactccatctcaaaagtaaataaataagtaaataaatacatacaaataaaaaataaaaccctggaagcctttgccgttggattatttctgcctctctctatatttgatatagtcaatttccatctttcaatttaaagttttctcacagtggtgataaaatattgggtttgggaaagaaaatgcctgctgcaggggaagaaggaggaggctgttctctggagcacaaggagccgaggctgctcaaagttctgctgtgtcatttttcctcctcattgccgcccagtgagcatcaagcatcactggtattaggggataggaacggcttttaaacctctgtcttcagggcccgtctgccaggtgcagtttctggcttcatgtgttgagtaggttggtcaaatcaaatctcctggaccccctccgaggatgtggttgccctgggccctacacagtgatacatcacacagcttcatcccttccaattagcgcccggtacgcgaattgatgtactgagaattaacatcattgatcttcatccaagaatatggccaacaaggcataatttttttctgatcaatgttgctgatcaatgacctaatataaaaaaaggaaaaaaggaagggcatccccaggcatcagggtggattgatgcgcctctatgcatgcagttccaatagacctcagggcctgttctctgctggggattcacattaataacagacagtctttcaagcacaatgagaaacttgtgctccatgcttccaaggaaatcccatgtttctccaagagagaggggaaatcaggcacctcctatggcaaccagcctcggggcagacagaactcagtgcctgccacagctaggtaaggcccggtggcccactttatagaagtggcaggaaccagtgggctccccacgtccaccccctctaggccactgtctttgtgccacagtttattgggatcctctgtgggaggtggaccagggaataataaggaaagaaaacaatttacttctccccagttatatccaaccgaggtaagtcaagctctctgggagtctgtccacggcagaggaaattctagctccaggtttccagtgtgaaggcaaaagggtgaaattgtccacgtgttaccaatctcaagtctccctgctttttatctcctcccagggctcctactgcccccaccccctgcccccagcgcgactccattagtcatgcctcagctgcccagcaagaggctcaccttgtcacactgcagggtttatttattacccacgctgggggtatttgcatttcaaaataaaaccctgcagaaagcaatggctccatctaaaagaatgactctccattgtttgaatgtcaagcactgtggttcactggagcagggcctcccagcttggtacaccgttggggttgggggaccagcatttatgataccctggaatgacactgcttaggaagccacctttttggtgcctttcagttgatttcaggcagtcattcatgcactgtttctcgaacactgtctgtgcatctgcccggcacccacactacggatgcacgatggtgacaggcagcactgtgacaacagcatggcagagtttaccattcctgccgtcccctctgcttttggcctctcctccacaattacttgcttttccttgataaggaggagggaaaattgcaatctagtctcctaacccagatgtcaccaacaaatatcaccagatagtcactaacctcaaaaaatgaggcttaattggtggcaattttgctaagtaacttcagttccttttgtctcagtttctacctttatatggaaaaggacacttgtcacatgaaattcatgagctcatgtctatacctcactgcccagtgttgtattatttactctgcggtatgagtgtctctttccattgtaataacaaggtcactgggcagaaaatcacttcatagagaaaggggtaaaggacacctccaaaagaaaaaaaaaaaaaaaaagacaggagtggaaatcaatccctcaccttcctcaaagcagccctgtctcgtaactgccacaatctagctgtgaatcctgccatctggaagcacccccacaccctccttccgcctcgctgacacaccatcaatttccaaatgtaaccgacaatcccacctcttccccagggtctcgtaatttctctctccttttgccctctatcttatttaaaccacttgactctgtcctgcctattctggaggtgttgatcaaaaaccagttacattgtttatagagaaatgccctcagcttctggatgtctgcagtttctagtcacaacggctgtgattctttgaagtggccagtaaaccagatttttgacaggtgtggagggaaataattcccagactgaggaaagaagctgcaagccgttgtctcattccttgtgttagaatgccatcaagtgacagaccagagaacaccgctgcaaaccttgagcaccttttatgtctaatattccaagacctccctgggagagaaaatatgtaaaccaataaatataaatgccaaaataacccgtcacggtccaaatggccaaattagtattaaaggcagttcttgtccaggtgtcaagaagccttatttatttgtttatttatttatttatttatttagatcaagtctcactctgttgcccaggctggagtgcagtggcacgatctcagctcactgcaacttctgccccccagggtcaagcaattctcatgcctcagtctcccgagtagctggaataacaggcgagcactgccacacccggctaatttttgtatttctagtagaaacagggtttcaccatattggccaggctggtctcgaactcctgacctcaagtgatctgcccgcctcggcctccaaagtgctgggattacaggcgtgagcccctgcacccgctcagagttccttacattcttgaatagaatataagatggtagaaacctaacaatctgagaattataacccaattttcagtattgcaatgctgggtcatgttttaccatttggttcccgatgggaagaagccaggggcaaccctcaaagccaccagtgctccaaaaggaaaggccaacgggggccgccaggtgggtgctaaagctgtatcctccatccagaggctcacggcttctggggatcctcaagaagcctaaagacccaagagaaacaggggaacttcctcaagctcacaaagagagcagctgcaccccagccccggcccctgctgctctgcagataagtgccaggtatgaaatgagggccggtcctcggaattgtgcattgacaggcagggttgaagcctcaggaatgaggtaatggtaaatgcctgcacacacagatttaacatttttcattttttttcccctcttagagacaaggctcactctgtcatccaggctagagtgcagtggcttaatcatagctcaatgcagccccgaactcctgggctcaagcgaccctcccgtctcagccttctgagtggccgggaccacagaactagtgatagcatggagaagatggaaatgacactgtgtccagaccagaaagggggcattctacaagctgacaatctccatgtcccagcacttcagacagctgaagcccctgaagcctcagacagctgagggctcctggcagtgaagcagccttcaggccccagagcacccagagagcttctcccagggtccctctctctctagcaccagtggtacctgggctgcagggaggttggtaggggtccccagggattccttcatgtgataagctagacacggggccccaaagaggcttcagggcttgaggaagataaatatttatcagatcattacaaaggaagagtgtggctgggcaaggtggctcacgcctataatcccaatactttgggaggcccaggcaggcaggtcacttgaagtcaagagtttgagaccagccgggacaacatagtgaagccctatctctactaaaagtacaaaaattagcagagtgtgatggcgcatgcctgtagtcccagctattcgggaggctgaggcagaagaatcgctagatcccaggaggcagaggttgcagtgagctgagatggcatcactgcactccaggctgggtgatggagcaagactgtctcaaaaaaaaaaaaaaagctaaaaacaaaaaacaaaaaacaaaaaaaaaaacataggaagagggtatatggtctggggaagtattctcagtagttacaaaagtgttaagtcggcctgggtgcagtggctgatgcctgtaatcccagcactttgggaggccaaggtgggaggattgcttgaggccaggagttcaagaccagcctggacaacgtagtgagacccccaattttacaaaaatgtttttaattacccaggcgtgatgacatgcacttatggtcccagccactcaggaggctgaggcgggaggattgcttgagcccaggagttcgaggctattgtaagctatgatcaagccactgcactctagcctaggaaacagagcaagaccctgtctctaaggaaaaaaaatttgttaaatcggaacatgcaggtatttaccatcacagggaacattgaaagtattttttagctttgaatttccatgcctctgctgaaaattcctcatctgctcacctgtttgacccatctttccctctaagtttgttaatctatttataatagtattttaaaggcctcgtcttccagttcagcgtctgggtcacctacgcttctgctctagtgactttctttccatgattgtgggtcacagtgtcctgtttctgtgggtgtcgtatacactgttttttatatttcaagctggatgttgtatattaaagaacagcagagactggagaagaccaaagggtctttccatctcccagaaaaggcaccccttttcctttcaggaagctttgctgaggggttgacctctgcacagaatcaggtttaaatagcttcagatcccctctggcttcaaatcattttcgttttttgagacagggtcacactctgttgcccaggctggagtgcagttgcaatcatagctcactgtagccttgaccttgacctcctgggctcaagcagtactcctacctcagcctccagagcaactgggactacaagtgtgtgccaccacgcctggctaattttttattttgttaatttttttgtagagatggagtctcacatgttgcccaggctggtctcaaactcctggcctcaagtgaccctcccacctcagcctccagaagtgctgggattacaaacgtgagccactgctcccagcctggcttcaaatatcttgaaggggaggtgtgtcccctgcccgcagcatggctttgggattcaggcaccacaaagccagatctctgtgcttccctgctgtgccccaattccagtttgggtgattttacatcaggtcctttctctcttactttcccatattttgacctaaacagacttatacgaatataaacacatagcccctaggtctggagtcaatggctgctttcccagagttaagcacaggtcaaaataggtggcaggaggtgctagctacatgcacacactcccatgcagcctgcagtgactttctgcaaacccttcaagtgtctcagcaaacctgagaaatgcagtgaagaagctctcttaggacacagagagccctacgtttatccagacagacactccattagccgaaactatgctttcctcagtgcaatcagctcacagagtaacaccgggccagggagctggaagaaatctatagttgcattttatacatttgggatcaagctagccttaaagagtgacttttggaggctgaaagactagaaaacttggatttcagagactgatatgtgaccagacacacgaagttttaagagtccccgctgtcagaattccaaatggttagtcttaaactgacttagggcgcagcgctgcctctttacaaagagctgatacgctgtcttccggcaagcaccagttctttgattcttgtagacaaagtgcctatcacccagcaggagagggtttgaccagcagaagtgtccagtgttagcgctggcaccttaccgcctatctctgtggcactattaggcctgaggaatgattgagggctgatgtcgctgtgcccaggctctccaccaccaccctcaccagccctcctcgtcaatacacaacgtctggatcaagggcatagcagagccaggggagcatgtaatcttgagcctcagggactgttctgtcctagtgaggacacagataatgatggctaccatctctcaagctgtattacctgtgccaggccctgtttaaacatgcatcatcttgctgagtgctccaggccaccctgggaagaaggtgctgttagcaacccatgttatagacaaggccttcctgtagaaaaagcatacaggcctcatccctctcaaatgtacctgatatagatacccaaaaagcaagaaaaaaactgtgtatatttatatacacacacaaatacacacaaacagatgtgcatacatgtacatatatatactgacttcattgacttggtggattaaaattttcactgacaatgaaggcttccatgttcttattgcaggtttgctggtattcaggatcatgacctttcagcggtaaaaaaaaaaaaaaaaaaaacctactagaggccaggtacggtggctcaggactgtaatcccagcactttgggaggccgaggcgggtggatcacttgaggtcaggagttcaagaccagcctggccaacatagtgaaaccctgtctctactaatagcaaaattatagccgggcgtggtggcaagcacctgtaaccccagctactcaggaggctgaagcagaagaatcccttgaacctgggaggcagaggctgcaatgagccaagatcgcaccactgcactccagcctcggcaacagagtaagactccatctcaaaaaaaaaaaaaaaaaaaaaaaaaaaaaaaaaaactagaaataatgtttttctttaatccgaaagtggaggagaggggatacacaaaaaaatacttctccactatattgtcagaggctattagataaatggtttctgtaaatttagttgtgtttatttacagaagtcctaattttcgtggatacccacttacttaatagttgaggcttaatctttttgagcttacatatgagatttttcttgaatactcagaatagcagcctgaatgtctcagagcaacaatcaaaaggaacctgtacaaatacaacaaagtgtgaattgtagaatcaaaaagcatatgggtgttcactgtttaaatgtttccattattctgtatatttgaagtttttcataataaattgctggaggtcggaggggagtcacctgcaatgattccatcaaacattgacttctcgtggaactttcacaaagccactactgggaaaacacatgtgtatccatgtttgaaagtttatcatttatagctataaaaaagaaaaaaattaaagtcttttcaccaaatgcaatttagaaaagagaaacaaaaggaaaaatctcccataacttcacttacccggttatacaaacttttagtatattcatgtaactattgtgtatatatttggctttattagtttgtaacctttttaaaaattgtatgtaatttgtttaatggctgcatggtaatccatcatgttatagaaatgtgttagcagtggcagagaaccgagttaccccaagtaactggagacgaatccgtacgcgttcgcagcaacttcaatctttgccttgtcaaaagaaagaatttgactgaggggcaaaaagcagaaagagaccaaggcaagtttcagagcaggagtggaagtttattaaaaagctttaggccgggcatgatggctcacacctgtaatcccagcactttgggaggccgaggcgggtggatcacaaggtcaggaattcgagaccagcctgaccaacatggtgaaaccccatctctactaaaaatacaaaaattagctgggtatggtggtgtgtgtctctaatcccagctacttgggaggctgaggcaggagaatcgcttgaacctgggaggtggaggttgcagtgagccaagatcgtgccactgcactccagcctaggagatagagcaagactccgtctcggaaaaaaaaaaaaaaaaaagcaaagcttttgaacagtaaggaaaggaaagaaaaggaaagtattatacaagttggaaggacaagcaggcaacttgagaaaccaagagcgcagcctgaccccttgacttggggttttacacgttggcctacttccaggatctacttccaggatcttacattacttctccccactcctgagatcttacaggaagctgctgatcagtttcaggtgttttctatctgttaggcggctgcctgttccctagcgccagctgtggccaattactttagagaaacagttaacaaccacctgaccatcacctgatggtggcccaacacccctggtgtgtgtagcggggagccttctcctgccctgctcatacctgactacctacctactgtaacaaatgtgccatacctaggaacagtttataaaaacagattactgggacccaccttataaaaacagattattgagacccactggataaaaacgaatctccaggtatgataccaagaaatttgaaatgaaagcttaccctgtgattgtgatcctgtatttggtctgtggatcaagcaaattaagtgtgtgctaactaatcaggtaaattaatgcatttaataatgcattaattagcatacctaattacctaattagcacatagttaatttgcttgatccactatgatcaaatatagcattgtttttaagtttttgctattataaacaaaaatcacaaacatcctcacaggtatctctctgcatacagaaacattttctgagaataatcaagtggtttgtttgctttttattttttttgtttgtttgctttttaaaaaatattttaggctgggcgcagtggctcacccctgtaatctcagcactttgggaggccgaggcgggtggatcatgagatcaggagttcgagaccaacctgaccaacatggtaaaaccctgtctctactaaaaatacaaaaattagctgggcgtggtggtgtgtgcctgtaatctcagctactcaggaggctgaggcaggagaatcacttcaacctaggaggcagaggttgcagtgagccgagatcacaccattgcactccagcctggacaacacagcaagactccgtctcaaaaaaaaaaatattttaatgatgaaggaactatgttgtaattgcaactcaaggacgacccaccccaccaccatcagggaattcgaggggagactggcagttatccagggatcccagaaggagtcaactgggagttaagagtcctaacaaccctagaaaaaaactttcaaagacacaggtcttctcattaatctccataatcacagaggtcttgcctaaaagggccccccttgagtacacagctctgaaactggctaacatcttctgctgtctcatttgattttaaagttcacatttgtgaagggctctattgtacaacatggtgactatagttaataacagtgaatttcagttaataacctgaatttcactgagagtaggtctgaagtgttctcatcacaaaatgagtgtattagcatcgctcatagctcatttagccattacacaatgtatacacatttcaaaccatattgtataccataaatacatacaattcttattggttaattttaaaaataataaaagttctctatcagtcccataaattacaattttcaggcatctgcaaaggcagcatgttttggtttaaatgtggtctttccaaattttatacgtataaaataaatgcataagtgtactacatatgcaaaaactaatacataaattttataaagtcaatgcacgcggggtcactgggatgaaccaatttcagtgcctgcagtctaatgtttaaaatcaaaatggtacaaggtcaccaccaaagaaattgtttaagccaatgtttctcaaactaaaacctttggacatactcccagaatcccctgtaaagaaatgtatactgtactcaaagttgagaaccactgacttagcataaagggaccgtatttcttttctctcccacccagcacaggcccagtgctcagcagaaattggggctccacagttctgcccaacactgggtcactgctgagaagtctgcaccaggccttcctgcacctttccactgagcaatggagtttgtttattcatttatttatttatatggaatttatttatttattttggagacagggtctcactctgtcacccaggctggagtgcagtagcgcaatccaggttcactgcagccctaaactccttgggctcaactgatcctcccacctcagatacccgagtagttgggactacaagcacgcaccaccacgcctggataattttttttaaatgttttgtagagatggggtctcccgatgttgcccaggctggtctcgaactcctgggctcaagagatcctcccgcctgcgcctcccacggtgtgagccacctttgatcttattgctatgatttttttattgataaaaactaataaatattctgagtctcaagaaagctttctgaaactatcaaagggacccaggcggcgcatcactacctgtgaggccgaccccactcacagcacagactgcaagtgaggcttacagatgggaagtgccctaagcgaggttaaacagctagttagcagcagacacggaactagaacctaagcctgctgtcccagcttcggtgcccgtgctcacagcggaagctgcctcggctcatccgtaagggcgctgattagggacgacaaagacctcaccccaccgtccccgtcccatttccgccctcccagatccccaacctccttcgagtcctctccaagtcgcctcgcctcgctccactccaggccttagcaagcattccacatgcctttaccccaaccctactgcctgtcccccaaaagatgcaggcggaaaagaccccaggaagcgagcccactcctccccactgctcagcaacaccgcctacgacgttctcagtagccgaatccctttccaggcgcatgcgcccccgaggtgggcgagcgccggtgatgtcacgcatagcgccatctccgagctccgagagtctgcgacagcagctgccagtgcgtcatcagagagcgccggaagcggtccgagaatgaagagtaagcggggccgcgaagttggagagggttggggacgttaagggtcggggtcttggtactggtgggtgaaatgggtccgggctacctgttgctgcggagtcctaacagaaccgctacaggaatgggcccaccctacctaagaaaaactgagggctggagcacgggttagcctggctcgacctctgagctagggagggatgtcagggctggaggcaggttctcccggaggctgctcagtggtgtgcgatgctagaggagggttccaggccttggctcaacttggccactatctcccggggtgaccgcggtcaagatcctgctcctttctgcgagctggtttcacactcttaacctgatgcaaagcgccgagagctgctggggaatgatatcactaacccaaagctttggtccttaggggtagaagacatgtgccaaggaggggcgtgtagacaccgttaagactgggccttcaatcagaatttttatttttcatctctgccactttctacctatatgatcaagtagattgtctcggcatgtctgagcttcagtttgctcatgcacataagtgtaatgagaaaaaatatgtgtaccttgtaatgaggtttctggcaagtaatggatgttcagtaattgttagatgtgtattgttgcagaaagacttccaagtctgttactaagcacctgtaacagatgaagcaaagttatcaggccccgcaagttgctctctacagtttataatccccatcttccatttgagggagaactagatgctatatataaaacttgcaaccacattggtttgcttgatcaaacaaacatacctggctgggtgtggtgggacacgcctgtggtcccagcactttgggaggctgaggcagggggatcacttgaggccaagagttgaagaccaacttgggcaacaacatagcgagaccctgtctctacaaaaactggaaaaaaaaaaaaagaattagccaggtgtggtggcacacacctgtagtctcagctactcaggagactgaggtgggaggatcacttgaaaccaggaggtcgaagttgcagtgagctatgattgtgccactgcactccagccagggcaacagagcaaaacccagtatcaaaacaaacaaacaaacaacaaaaaaaaaaaacttgtaaccaccttgcatcaaacattctcagggaagtacaagaaagctggaattaaatttacagagtatagtgtaaattacattttctagctatttagctcataaaccaggccttagtagtcccattcttattccattcacacctgtactctgtccccagtgccatggttttcttctttcaaaaaattaagaaacagaagtgtggaatttattttagaggttgaaactttattgaccaatgtatattttgagtttaaaggaaaaacttgtattttatcagttcaggacaccatcgattatgtgacacattataatttcatattaaaatgtgaagaatctttttaaacatcttacagttaacaaaacctatttctaaccatctacatcctagacagctatatcatataacttttaatgagttaccttgttagcaagtgctcaagcttctaacttggggtattttaaaccaatgcaactcaaaatgtgattcactgacctgcagtagtatctgggaatatgttaaacactcaggatctagggtaggagaccaataatctgcattttaataagatcccagagatttttacacacgttaaattttgagaagcattctttttaaaccatgtgcttggaacttctagcatagatgtggccagagggtgggataagaggcatccaagaaagctttgctcttaataccaacctcatcttctcctatctctgaataagcagttgttctgctataagtgtagaagtgtagttattttcttttcttttcttttcttttttttttttttttttttttgagacagagtctcactctgtcacccaggctggagtgcaatggcacgatcttggcgcattgcagcctctgcctcccaggttccagcgattctcctgcctcaatctcccatgtagctgggaatacaagtgcaagccaccatccccggctaatttttgtatttttagtagagacggggtttcaccatgttggccaggccggtcttgaactcctgaccttgggtcaggatccgcccgccttggcctcccaaagtgctaggactacaggtatgagccactgcgcctagtggcgtagttattttcatagttagaaaagtcttgggtcttacagccatacccaacaagaattgatcatttcttttttttaatcccccaggtgtgatctaccatgcattgtctcagaaagaggcgaatgactccgatgtccaggtcagttcttggcagggagtccaggagcaacagaggtgatggcaaagatggctcagtagcttctgagcccccagcactgattgagatgtcctttcccacatcatactcctcatttttctggcagacatctaaggctggatcaaagtctgtagttctcattacctgttcccacgtgccagcctccttttctgttgtgccaaagtcaagtttggtaaaatgaggctttccttaaccttttatcatttcccactgtgttggggacaccaggctgtgcccacgtggtgggcagcatcattcaaccttgtcactgtgccctctgcacttctgcagaaggtgtgcaatcacatatcataagtgaaatttacagattatatctgaatgcctcggcctgctttgtcagttttgcaaaagttcctcttgtggctcataatgagagcattaccttgaaagcaagattttgaaagaccagtatacctttattttgcttctccatgaaagatgagccactcaggtatttaagagaatcagatcattgtcctattatagtcacaatgacgagagtgaattaatttttagttagcatctacaggtgcaaagctgaagcagagttcccaccatcatactgtgagctccctcgaaggctatatgtaccctatcttcccatccccattgctctcccacagaaggaaggctgcgttactattgacagatcagcatcagtctgtcagcctcagtcttagcatttagcacctggctagtgcaaaaagagctcaggaaacagcccagccaggagacaggccctcaggagagagaactgcccaggtctgtggcaggcatgagggcagtggcattgccaccaaatgaggaatccgttattggaactccaacctgagaggtagtgagcttggagggtttctttgtttgtttgtttgtttgtttgtttgtttgagaattgcacacaattacgacagtcatttttcccagaagtcctctctaagagcctgtgctcattcatggtaagttgacgccctgctctcagtgacacccttcagagagagcgagcctggggcctgagatgctctcgacggtaccttcctccaagtgatggtctgcggggcgggagcggaccttttggagagtggccacaccatgcccacagagctggaaacccggttaaggagtattgtcctaagggcacagtgtcagggtccctgcgccctgaggcttggccgaccctggagccctagttttgctgttttctgtagtgttaggatcacttcctccatagcttagtgctactctgagctcactttcatctggtcatgcctggttgaatatatttgttatacatttctcaagctttctcttctgccaaggatgagagaattcttcttcaagatagaaaggttttggtcctttcagaataacctcagaaaagcagggccagagcaggaagtgagcgtttgacacgctgttgtgtgtgacaaacggtcatgaattggtgtgtgagtgtgacttacatctcggcagctgtgggtagcagatgcatggcggatgagcaggttgagagcctcagtaggtaaagggatgggccccatttgctcttgcagtagctgccgggaatggcgggcgggatgcctgggatcctgggctgcccagaccggagcagtgagcgccgcacccccttgtccgcctgcagccttcaggagcacagcgggccgaggccttcgtgagggccttcctgaagcgcagcacgccccgcatgagcccgcaggcccgcgaggaccagctgcagcgcaaggcggtggtcctggagtacttcacccgccacaagcgcaaggagaagaagaagaaagccaaaggcctctctgccaggcaaaggagggagctgcggctctttgacattaaaccagagcagcagaggtaacccgagctccccacgtctttctgcccgcggtgcttacccttcttggtgtgtgaacttggctgagtggctggggaggcagcctggctccacctaagctaagggggcctctctgtcgtctgccacaagagggcagccttcctttaccaatctgggctgtgttcagcgaggcgggtgagacaggactcattgtctggcctctctcctcaccttcaggagtaagacccgtgcaagtacatctgttgcccatggcaacaggctgtttgtccttcggctttgttagacagaaaagaggaactgatatgtttttagtgtgtattactttgtagcttttgatagagccagacagtcacccactcgggtttcattgccaaagcaagatgttgcccacacgtttcagaagtttccaaaaggaatgcatcactgtcctgtcctgtgggaggatgtcttcctccagccgacccgccatccctccttggtgacgggtctgagtgtgggtgtcttggggctgtctgtaggcttttgcttggagatcaacggccaaatagcctcccacgctccagaagacgcttaaagtatgccatgctgttcccggccccactcaggagatcagctgggcctcaggtggagaaggggctgctgcctcccagggtttgcctcccgggtggagcccaggttgggtttgagcttaaggtcctcatttctctaacctaaggctttgtggtaacggattccccacaggatatcaagactggagataatggcccagaagaacgctgttggggtccttgcccctgctccccgcttcttctccccaccacttgcttgcccaccttccagaccagcctgctgcctcacatgaggacctgcgtgacaaccagcaacccctgctttactgggggcttactaggttcaatttcacgtaacagaaaacctcaaaataacagtagcttcaacaagactcacgtttatttctctctcatgaaaagaagtccaggtggacaccgccctgggctggtgtggtcctaccaatgaggaaactgaggttagagaggtgtaggttcttggtctcggttatcagctcaattgctcatcgtcggatttgcacatagttcctaatgatcccaggttgcagttgttggcatcaagtcaagctctgtgctatttggacattgtcatcccaagctcatgttgtctaactttttccctgtttctgactttgctgcagatacagccttttcctccctctccatgaactctggaaacagtacatcagggacctgtgcagtgggctcaagccagacacgtaagttgcattcctgaagctttgctctttggggtggatctcaagcctctgatcattgtaaatgcggcttcaggaaccagcgttggtattgcctggctgcagacggttaaagacctagttgcttcttttggaactttttatcatgatgtaaaccaagggcttctgtttaccctgcaggcagccacagatgattcaggccaagctcttaaaggcagatcttcacggggctattatttcaggtaatttacctaagagcgtgtagcacatggccatccagaggttcactctgtcactctgtggagacccagggcgtgtgttctgttggacacactctttaccgtgtggattccctgagatggcccccagtcaccatcatccccacgctaagggtgggagatgcttctcgctggctgtcttagccagtccggccatttgctggacacaccctaagtggtctctgtgtaccttctccacacagggacccctgttggtaccctaaagggcacagtggctgcgagcactcacccacggcctgggatcttgaacacagaatccctttcatccaatgctgtggtttcaaatgtcagctacacctgacagcccccaaggtgacatctccagcgtaggcctgtcccctgaactccaggctcaggcatccagctgcccacttgacatagccacctggatgttcagggggcatctcagactttacatagccaaagctgccaccgattctcctcacagcaacccctcctggtcttttccatctcagttaattactcagttatttacactggttgttcagaccaaaaacctaaacagtgtctatgtttcttctttcctaatctcctcgaatccttcggaacatcctactacttaaattcagccactgtcattccccagattacctcagacacagctcctcaccgcaccaggcagccagagtgccggttacgtagaaatcagagcacgttccttccctgcttcaagtcttctggcagcgtcccatcgtatgggagtaaacctgcctccttgctgtggtctaaggcctccccgctccctggggcagcaggcctcccacactgccttcctcctgccctgcctcagggcttcgcctctgctccttacctctacccgggagttctcctgtgtgtgcacagtccagcttctcattgttcagccctgctccaatgccactcccctcagggtctaccattgcaaaccatgaccctccacacattgccctgtccctactcttcatagcactcgttgctgtcagaaagtagaatggtgtggttcaccgtgcatcaccctgccttgctagaacccgggctccgtgagagtaggatccaggaccgcctctttccgtgctgtgtccctggcatctcctgaggatggtgcaggcattccacagctgcttggtgactctgtccgctacactgaggctcgggtcaggacgagggaggggctgctgcttgtgatggtggctcatctcgcagtgctggctgctgggcagctctgcagccacactcacgttccagccagcatcctgggcagtgcatggtggtgtttgtgcagatcctgcaagggagacctggctgcatcagagcagccagcccgtgggccctgatggtgctgggcacatatgtgacctttaattccagaatcctgcccaagacccctgtggccacagaccctccgaaggacacctcataggaacagtccagaggctgcaaagccccaggggaagcctggattcttgttggttacatcagggcccagctgttgagcccccaccccctgggtgctctgttctttcatctgctagctcagagggtgggatcagcacccccaacccctgaggcctgcttctctgtggttcccccagcaccacagaggcctgagcctggaactgtcctttttctttgcagtgacaaaatccaaatgcccctcttatgtgggtattacaggaatccttctacaggaaacaaagcacattttcaaaattatcaccaaagaagaccgcctgaaaggtatgtaggtgtttctgagggcattgcttgcgggctgtggctcccagctactgcgttagccttttcctcaaggctccaagagtttgatttgacccctcaagtcagcgcagattgcagatacttgctgaacctgcattaaagcctgcagagaccatcccctgcacccgtggctcccccaagaggtgtgtgtcagtgcagcctgcaaccccggccagaaatggccaaggggaaggaagacctgctcggctgtgcctcaggggacctgggtctgtttaggccccaggagagggcctccacctgccccaaaggctgctgctcccagaggaatgtagccaaacaggcagcagggtagaaacaggagtggcgcctgtccctggagttctgagctgtgtccttggcgataacacttgggttccatccgtggccagcattgctctagcagatactttgggtcagccaggatttctacaccccgccttacccacaaatccagagatatcaaaccatagttagaaggttttgttcctttaatttttcttttttttttttttggagacagtctcactcttccacccaggctggagtgcagtggcacaatctcgactcactgcagcctccactcccggattcaagggattcttctgcctcagcctcccaagtagctgggattacaggcacgcgccaccacgcccggctaatttttgtatttttagtagaggcagggtttcaccatgttggacaggctggtctcaaactcctgaactcaagtaattcacctgcctcagcctcctaaagtgctgggattataggtgtgagccaccgcgcccagccttcttcctttaatttttgagcttggtttttcttgttgcttcccttattttcctacatatccttctacctcacattgtaaacctcggaaagtggtgtaatagtttctccacagagcataaggccaggagcccatctgaaagttaatgtgggaaaaccagtttctggcaggtgttctgggactttctggttctgggaatttggtgtatagcctttgaccctgaagattaggtgccaagctacatttagcatgtgactagattgacctgtggcagaataaccacaggcaaccctaatgcccctccccttgtgggtttcccgtttcctattagcttatttttttcattcaatgtgttctgaataatattctacctaaaagtaaaatattaataaatatttttcctcatctttttttctcctgcctttttttttttttttttcagttatccccaagctaaactgcgtgttcactgtggaaaccgatggctttatttcctacatttacgggagcaaattccagcttcggtcaagtgaacggtctgcgaagaagttcaaagcgaagggaacgattgacctgtgaattctttgccgtctaaggcagttgtttatgacagctgaaaactggacactccctaaatgtccacctttcagtgaagagatagttaagccaattccatttatagaccacctccagccagtgacgctccgagttgaggatgttgaacaacatgggaaggtcgcagcgtactaagtgaagaagtcagaggacagaggaatttctctttctaggagattttcattttgtgtgactcccatggggaggaacagactggcaggaagcacaccggggttaacactggttgacttgaataggattattcgatttttaaaaatacttttccatgttttctgagtgctctatgataaatcagttgcatctgtgataatacagtacatatgtggacataaacagggatcaaataaaggaggtattgctgcagtccagccaggttgaaagggaaggggggtccccaaaggtccattggatggcaggtgtctacagaggctcgcctttgggtggaactctgacccacctaaggtttactttgctatttcaggaaggttgaagaggattgaagggtgagttgctaagtgacttagggtttattcacttcaggaatcatagctggggtggaccccaggagcagagtactgcatgcagctgtgcccatgcatggttgccccagcgtagtgagatgggacctgccgcagcatgcccactcctgagctgccaggctgagccatggaggactgaaaggaggtcgcccggcatcacctcccgaggtgagacctgctgcaaaagccaagccagcagcattgacgccctttgatatcttcgccatttttgctgctgaaagacttggcttttcagtctgaccctggccctctgtgaccatgtgtctgtaaagccagtgggtcaggcccttccatgcagggccagaggaaaagcgggcccagggctgcagtgagagcggggcaggggaccagcctaccagatgggttggaaacatggctcagaaggaccaactaccccttccctttgaggagcaagtctctgccgatcagcaaggcaaggccaggagccctcctggcgaaaggcaggccacaaatctgttctcccccaggagaagtagcagtgccagggctttgcgtttctggtaacttccacccaaaccacaccagagagaaacaccgtagtggagaagggaagtgggagcgctgactgctgtgtgccaggagagtagaaaggcccaggtctgtgccaccacccctccccaaagctcagtgcacccagagtctcacagggaccaacacggtgcctcggtcctgcttccatccatgcaagtgtcctccgctcaccagggtgttctgaggcagctcaagtgctctcccccaagcagcacgcagtcaccgctgccagtgatgaacacacgcacgggctaggcacatggagcccaagcacactgccacctcggacacgggccccggcccagcgactgccttgtggtgtggccgtcctcatctgccacaggaagacagacttcgagggacctcttgcctaaggcctcgctgactcaagggtagattgagatttggacctaataggctccagaactgtgctttgagctacagggtggctgcaggatgagacggatgcagttcaaagtgcaggatgtgctgcctttattacctgctttcccgctgagcaaatccctgtcttgagtgggaagtggcatctattcccccagccatctgaaaatgctgtgttcataaccaaataggtgctgtagcttcctagccatcccgctcttacccgcccctctgcaatgtaaaaggcgtccactgttgtgtaaatacacagttgctttccagaaaagttgtaggtaccacttgccatgtgaaatctgtttttcatttagctcagactcaagtttctgtgtgagtggcggtttaatttgtagatacctctccctctcccccaaggagacatggtgagggtgctcaccggccactaagctgccgctgtgcctgcctgtttctaggatacactgttgccctcatggcccacccaggggtcatatctcccaggtagaggagggaaaggggagggcccagctgggcgggacatggttcctgatgaggaacagctgcagaaagcatgatctgaggcccaggggccgtggcaggggccagggctgccatgtctccacaggctgcggcacagcttgtcatggagggtaatgtggtgctttttggcccgatctctcccatgtccactgtccaaggagcaggaccctggcagagctgaggccttggccatgtggtcccacgggagacagagccacattcgacttgtgtaagcctccatgcaccagagaaagtgccaaagaggagagagtggttagcaactcaggacaggacccagaggctgcaggactgggagacatcagcccagcgacccactgctcaaagagtggggcccaggggccctttacatcttcccagtgcccagctgccacacagggtctgcagaggataggccagagcctcgggggaaaggatgaggttcttggaggagaaaggacagcgaaaggacagcgtgggccatggctgatgtatccatctgctctaatcttcataacaaaatgccacacactggggctgcagcattttctcacagctcttgaggctggaagccaaagatcaaggtgctggcagggctggtttctggagaggcctctcccttcttgtcctcacatggcctttcctccctgtgtgcaaggaaagtgatccctcgggtcttttccttgtagaaggacgccagtcctattggatcaggccgtgttcttatgaactcgtgaaagtctccagacagtcacagtgggggcaagggctttatcatatgaatttggagacccaagtcagtccacagccaccccgaagctttcccagccaggacagcctggttgtgcctcccagaaagactccaacagctacctgactcccaacctcagacactagccaggccttctctttcccccatatgggctgcttggaccactagccagtccagccagccccaatgctggcccctgagctgccatcaccactggattctgtgacatgctcatacaggaacttgggtccagggctgctccctccagtacccggggcccctgagctgcccagttccccttcacttttgcaaacagctgaactcctcctcccgctggggccaggcacagtctggatgggggaggaaatgcgtgtgcaggtgggcaggatgggcagagaagtctccctggagcaggggctccggctctaggcagctgtgggtgtgaagagtgtattcacaccaaggctcagggcaggagcccgcagaagcattgtggaggacccaggaaggcaggggaagcctgcgagggtctgccccctgggctcaggcaggcaggaggagaggccggaaggggtatatggctgccaggagtggagagatggcagagatgctggaaaagccctaatccatggggcaggaggtggagttctgctgatccattcacgcagttctgaagtcttggggaccttggtgccgccatctgtcaagtggggccattagactagacccagcgttcctggaatggcatcctggaacttcccatatcagagttagtgggtgcacattcagagcagccagaccctgggctgcacctcagacctactgaatcagcctctggcggcgggacccagatagctgtgtgtttacctaagaccccagctgatcactgatgtttgaggacgctgggctccagatggtgtctaaagtctcttccagctctgaggtctggactgtgatttcagacttgggactctcaggccaacgttttctggaggctgggaaagatcatcaaatgactgatctcccaggttccaaagagtaaacaggaacatccctccacaaagccgtaaattctggtaaaaaagctcgctttctggacaatggctttagctttaatttagtttgcatttcttagctataatgtctaattaagacatctgttaaatgtctacaatattaatagaaggggttctaatagaactgtattggaattgtccatttaattaacctcgtgagcctttaatggatgtcttaaatagacatcattaacaagagtgctagacaaattaaaattagagtcaataacattcttggtaatttttcctgagctgtaaaggacaagccttgctaactagacaggcgcagagataggctgtgttcacaggagggtgggcgctgctgtcctagagggcatctgaaatggacaggccccaagtgggattcagctattctgtgtcttggtccactttgcccataaaagataacctccagccataggaggcaggtctcaggagcaaagacctgcccttccctatgccttttacagaaaacgtttgctgggccaggcgtggtggctcacgtgagcctataatcccagcactttgggagactgaggcaagaggattgcttgagtctgggagtttgagaccagcctgggcaacatagcaagaccccatgtctacaaaaaaaaatttaaaagttgagctacacatggtggcatatgcctataatcccagctactcaggaggctgaggtgggaagatcacttgagcccaagaggttgaggttgcagtaagccatgattgtgccactgcactccagcctggatgacagatgagaccctatctctaaaaaaaaacaagaaagaaagaaaaagaaaaagtggcctgatccatcagagctcctggaggagggactggcttaggagggagatggaggaggatataggacctcacccagagactcacaaaacgccagatagatgcacagactgggtgaaatgcaacagactgggatagggaaggatttcctgggacaggccgggagcaggatgaaatggaaaacattccattcttttgcctccaccgccccactaagccactctcactcaagtgactgcgtctctccagagccagtggtcggttctccgcctctgccttgcctggcctctcatcggcatttaacaggtcatcccttccttcctcctggaacacctcttatccccacactcccaactttcctcctgcctccctggctactccctctcactgtcctttgggagctcctctgcagaacttctcagtgttagaatgccctgagctctgcctttggacttctttccccattccctccatagctgtctcgtccaccacttcagatccaccagacccacatgtgtaacttggtttaccatctgcctcctgccagctagaacggaagttcctaaggacaggactgttttcctcactgccataccctcactcatccagagtgtatctgactgtattcagtgttctgtgactgttgaggaaatgagaaagctgcccaccaggctccacctggagatctaacaggcagcccagcatggtgggctgcacacagcatgacggacttcccttctcttcccttccttccacccgcgcttctgcggaggcccctcgcctcttggatgctcacacgggaaaccaaggagccatcctgattcctcccttgctttcacgcccccaccaacctttcatcacgacatggtggccctccttgcaaccctcccaccacctgctgctccagcccccttccacccacctgccagcacccagccacagccacagccccccgctggcctccctgcatccacgcctggcctcactgtagcccgggtgacctttgtgaaacatgactcggggtgcctctcccgctgaaaacccacaagcgacttcctgctgcacgcagaatgagagccagcccctgatcggcatcatcaaggcccttccagatcagaccccagcccacccctgccatcgtggtccaccttcccgctgcaccctgtgcctctctacacccccaagcatgcgattgtccccgtgcacatctgtgcctgccattccttcctctcgagctttctcctgacccctcaatctgcaggcagcctccctgcgttcagctctgcacacagggaaggccccatcatcctagctctgcagcccccaccccaaccagtcactctgtcacattactctgtctgatatttccttttcctttttttttgagacagggtctcgctctgtcacccaggctggagtgcagtggtgtgatcatagctcacttcagcctcaacctccctgacttaagcgatcctcgcacctcaacccctcaagtagatgggaccagaggtacatgccaccatgcctggctaatttttgtttgcttgtttttttgaagagctgggggtcttgctgtgttgcccaggctggtctcaaactcctggccttaagcaatcctcctgcctcagcctcccgaagcgctagaattacaagcgcgagccactgcatccagcagtcttatgttttgtgtaccacttctcagtccccagtgcaaccatatctgcctgtttcatatcattttcttccactggaatgtgagctgctcggacgctgggacactgcccatggtgttcgccgccataaccattgtaagccccctgcaggggagaacactgccttgcatataataagtgctcagtaaatatttgttttctgacccaaaaagaaaaaatgagcccaggatgtgcctctaataatgttgaataagggttggcacacagcaactgcaagtggtgctggtcagtgacccctgtctgggccagatgagcccgtgtggcttgcccagggcagggcagctgcacatcctgagtccaacgtgccacccccccttccttgtcggtgggcacccctggtagcaggagccgcgggtgagaaggcagccctgtgccactgggccctggcaccccagctatgcagaccgaggaggttatgctccatcaacagctgtgacgtgcagcaagtgtggcccgcgcttctctgcccctttcagtttcccccatgaagccccagggtctggcgggagcagctatggctggcgctgcatagcctggcctggagaggctgagcccagcaggaaacccgagtcaggaaacccaagttcaaggcccaagttccccgagaccttcggttccaaccacagagaacgtgaagaaagggagtgtggtgtttattgcaggcacatttaatctacacaaattaaactgtatcctctaccaaaagagagggagggaggggaggaaagagaaaggacgctgtagagagtgctgccagtggctctgtcctgcctgtagagtgctgccagtggaggctcgccttgcagcgaatgtgagacggaaagcatcctcagttgccctgctctcccaaaaaagtgtgcgattataatgctttgtataaaaaaacacaggccccaaacaggtgctgtgccacaggggcttgtgctggctcatgagagctgatgtgtgcacctcctgcagacggcacattcatgccggcaccctgcaaccctcatggtgggaacatttacacagcaatttacactatgctacaaaccagggcttgttacacatgtaccagcatcccatcactgccctaaatgcaagctggctgctctgtgtgcagaacaggctgtgttaagtcatctttagggggctacctagccccatggaagatggggctccgtggcctgggagctggagacagagcgcttgctggctaaggcaggggagattgcaaacagaggatgtgtgttttctcagggcatatgttatacttcaatttaaaatgtttgtagaagaaccatttggactattatgtgggtgcttaataaatatctgaaatcatttgagcatctctccagcagtctcatttcttaatggtaatgccaggccaggcatgatggctcatgtctgtaatctcagcactttgggaggccgaggcgggtggatcacttgaggttaggagttcaaggctagcctggccaacatggtgaaacccggtctctactaaaaatacaaaaacaagctgggcgtggtggcaggcacctgtaatcccagctactcaagaggctgaggcaggaggattgcttgaacccaggaggcggaggttgcagtgagctgagatagcaccattgcactccagcatgggggacagatcgagactctgtctcaaaaaaaataaaaatggtaatgcccaggttaccctaagtggctcttgcttgaaaaatcacagatttaaagcaaggaaacccacattcctaagaaatgcagtatgtcaccaaactcacaattttaacagctccctcctttcaaaatacgggctcttccgctaccccagaactccagggaccaagtgctctgcagccctgtcactagggcgtggttgccacagccctcctggtcccgccctgtgaggtttccaattgagtagtgagagagtgagtggtgatgacaggaccctggggccacagggtgcggtgggaggggaacagggcctgtggcagaggcccctggcaggtctgaaagtaggctggcttccctcaggacctgaacttaagacaagccggagggctgagctggagtcaggcaggctgaggcctcctgcagaggagctggggtaggaagtggggcctgcaggggcatggcgctgaggaggctggaggcttcaggcaccaggcagggcagcaggaagtgaggaagactggcagtgaactggagaggccaagggccggaagaccagctaggaggttgtggccggtgctagacgtctgcagcttaaccagggtgtcggccttggggatgcacggaaacaggtttgagaggtgcacacagcacccacgaacagggcctcagggacacagcccctccagcctcggtctgggtgtctactcacagcccagtgccctgaagggtggcagccccactaggcgagtggagatggctccagccgtccaagctgctgaacaaggggctgtggacaaggccagcgtggccaaggaggcaggggctgcagctgaggtcttctcaggggaaaagggagcaggcaggtggggagacacccttgggcagacagaaataaggaggaagatggcagagctgggtcgcaggggtggggagccgtgtgggcatacctccgggtgttgggcaggctgcagccttgtctggcttagctttgtgagttcagtcaagggtgagcctccacccatgccttggcgtcctcatctgtaaaatgagcatcaggaataaagcacagccaataaagtttgtgtgtgtggtatcacccaaaaactcagagggttctgacagaatacagtaccatcttccaaacataggggtcgggcattctcccaaactgtccccttgggccaggtgtggtgccttatgcctttaatcccagcactttggaaggctgaggcaggaggatcacttaagcctgggaggttgaggctgtagtgagctgtgattgcaccactgcactccagcctgggtgacagagcaagaccctgtctctgaaaaaaaaaaaaaaagaaaacccacccacctgtcccctccatggctgcattctcagtaggaccccagaatacccccaggtagtcagcactggtggctggctgaggacactgagatgaattatccccggatcacatggccagtgggtgagtcacatggcaagtcccctctcaccaaatcagctattcttccagaacttgaggaagacttcctttcaccataaatgtaaagccccgttgcctgccagggtgggaacaggactattttttgcatggcatgaacccctgccagctcctgcctcctggcggtgcttgccgcagaatttacagaataaaataactattgaacaccctattatccggctgcctaattaatgtaaatgatagttatggtccccacaccgtggcatatgtttctcggaggaggccctgccagccgcctgggccccattccaggggtttttatggtagcagccccattctggctccattgagtaaaaggtaagttgtggccctaaataatgaagacagaagagctaatgggctcggtgaagaagggcagctcaggcgctggtctccgaatcaggtgacagaccctgcactaatgtggcaggccaggtctcactaacgcaggcctctgtaacacctgtttcagcattgactgagtggcgaagttaaatattaaaagctgatagagccagtgccctatacaaaggctggagtgtaacaaaagcccaccaggagttttgcccaggcctttcctgggccttgaagcatgacaaagtaacaaaggaattaacaggacccattttaagattaaacaagttgtatcggaggcctgaagaaactccccagacctccacaaacaagtttactggggatctgaaggaactccccaaacctccataatttagcaggagacaaaataagggtaatcgccccagcacctggacccatttagattaagtaaatttactgaggcttcagaggaagatcttcaggactcagatcttagttctagattaaaagaagttgggctgggcgcggtggctcacgcctctaatcccagcactttgggaggccgaggtgggtggatcacgaggtcaagagttcgaaaccagcctggccaacatggtaaaactccgtctctcctaagaatacaaaaattagctggtgtggtggcgtgcgcctgtaatcccaactactcaggaggctgaggcaggagaatcacttgaacccgggaggcggaggttgcagtgagctgagattgcaccactgcactccagcctgggtaacagagcaagactccgtctcaaaaaataaataaataagttaatcacttatgtctttagatgaatgtacacttacacataaacatatagcttagaaggtatataaactctgaaacccgaattttgagttggtctggtgacatttcctaggccttcttccccataactggttacagaaataaaaactcccttcctccccagttcatctgcatctcgttactgggccgtgagaaatagcagcccaaccctcaatttggcctggaaacgctaatagacggggtctttccttgcagacccgagtgctccacggacccccggtgcaacagtccctaggactctggaacagagacacagaggaggtgtttctcccagagcgctatacacagaataaaatcctatgaggcccatgtggcctggcccctgccctcctccagcctcacctcatgccaggcagctgcctcctctcctctggctcccagcgagtggcccatcctggccagtcttgccctggccttccctagttttagcacaaaccagagcagctggtcaccctactccagccccaccagctaggcttggtctcagggcatgggcccaggatggtcttccccattctatgtgtcttagtgcactggggctgttataacaaaaataccaaagactagatgatggataaagaatagaaatttattattcacagtcctggaagctgggaagtccaagatcaaggttctggcagatttggtgtctatcaagggctccttcctcatagacacgtctcttctcactgtgtccccactgggtgtggcacactgggtgtggcagaagggataagagagctctcggccgagcgtggtggctcacgtctataattccaacactttgggaggctgaggcgggtggatcacctgaggtcaggagttcgagaccagccaggccaacatgatgaaaccctatctctactaaaaatacaaaaattagccgggagtggtgggtgtgcctgcggtctcagctacttaggaagctgaggcaggagaattgcttaaacctgggaggcagaggtttcagtgagccaagattgccccatttcactccagcctaggtgacaagagcaaaactccatctaaaaataaataaataaaataaaataaagagagctctctgtggccacattttttttttttttttgagacagagtctcactctgttgcccaggctagagtacagagatgcaatcttggctcactgcaacctctgcttcctgggttcctgggttcaagcgattcttgtgcctcagcctcccgaatagctgggattatgggcatgcaccaccacacctagctaatttcggtattttctgtggtgatggggtttcgccatgttgcccaggctgctctcaaactcctgacctcaagtgatccgcccacctcggcctcccaaagtgttgagattacaggtgtgagccactgctcccggtctggcctcttttatagggcgttaatccctataaacactccatcctcaggacctaatcccatcccacagcccccgcctcttaacagcctcacattgggcatttggttcaatatatgaattggtggtggacacaaaatattaagtcgatagcagactgttagctcctcagggggcagaccgatgttttaggccttcccagaccaccctaagtccaccagtcaccatctccacagtgctggagagagaagctgactctgcatggctggtctgcttccgtcctgtgggaggaggctgggccctgcgttggccgcccaccccagccctccctctgtcacagtagcacttgcaggaagaggtggggctggcctttcttagaaagagcctgtgtccaaggccaggcacagtggctcacgcctgtaatcccagcactttgggaggccgaggtgggcggatcacctgaggtcaggagttcaaggccagcctggccaacatggcaaaacaccatctctactaaaaatacaaaaagaagccaggcctggtggtgggcacctgtaatcccagctactcgggaggttaaggcaggagaatcacttgaacccaggaggtggaggttgcagtaagctgggactgtgccactgcactctagcctgagacagagtgtccctctagacagagggagactccatctcaaaaaaaataaaaatgaaaataaagccaacaaaaaagaaataacctatgttcaactcggtgctgctcaatcctggctacctgttacaatcacctagggagttttaagaacaccaaagcccagacttcacctcccaaagttaatccagaatccctggggtggggccttgccatcagtatatacatatatagacagagagagggacagggtctcactctgtcacccaggctggagtgcagtggcgtgatctcggctcactgcaacctaatcttcccgggttcaagcgattctcgtgcctcagcctcccaaatagctgggattacaggcatgtgccactacacccagctagtttttgtatttttagtagagacggggtttcgtcatgttgcccaggctggtctcaaactcctgacctcaggtgacctgcctgcctcagcctcccaaagcgctgggattacaggtgtgagccaccgtgcctggccagcatcatatattatcggtgtatttttaatctacgtggcctagggcaagtcacctctgggagccagagcttccttgctgtagaatgaggagtatccaccctgtgctgtgggagtaatgggggccgggcacagggtaaacacgtgccatttgctgtcctggtgctttctgttgttgaatggacagttcagaacctccagaaatcaccctgagaatctcaggctttgtaacagcagtgtctcacccaggtctccgaggtgaccacggccactcacagggctgcaggctaggccaggtgcccctccaccaaggacccagacaccaggagcctggatttgccaccactttctatgctgtgttataaacacaaacatgtgtctgcctccttgactataagctctgatgaattcgcccctgagtcccaggctcagcgcaaaggccagctcgatgcaggggctcggagaatgagtaagtgaatcagtgaatgtgcccgcagctggtgtgatcaggaacttttgggtcatttcagggccgtctctggggcaggatggtgcttctgagaagggtccctggaccaacccacccaggagccatcacaggccaggtttctgtcccagcatgccttgcagggtgtgcctcggactcacatttccatagaaatgaaaagtaaaataccaaagtgcatcgcacatgtgtcaggtcgcttctatttcctcacattttattttaattatatgtgaaaaatggaggtcttggccaggcgcggtggatcatgcctgtaatcccagcactttgggaggccaaactggatggatcggctgaggccaggagttcaagaccagcctggccaacatggtgaaaccccatcacttctaaatgtacaaaaattagccaggctaattttacaggaacttgtaatcccagctactcgggaggccgaggcagaagaattgcttgaacctgggaggtggaggttgcagtgagctgagatcatgccattgcactccagcctgggtgacaagagcaagactccatttcaaaaaaaaaaaaaagaaaaagaaaaaagaaaaatgaaggtctctagacagcaaggggactgcactggtctattccaggaagctctgcaacagcaccaggcctgagggacagtgacaggtagataaatagaaaaatgctgcttaggagcagggttgcaagcccacaggatcagattgtcaagtttggagctgaactccagcctaggggtattttttgttttttcattttcttttgagacagggcctggctctgttgctcaacctggagcgcagtgacccaatcatggctcactgcagcctcaaactcctgggctcaagcaatccaccctcctcagtctcccaagtagctgggactacaggcacacctggaaaattattttatttttgttaaagaggaggtctctgttgtgcaggctgttctcaaacccctgggttcaagcgatccttccacctttgtttcccaaagcgctgggtttacaggtgtgagtcactgtggctggccccagcccaggttttcctactccactgccttgtacctggctcacccccctctatagaagcccatgatctcttctggttcaggagcaccatggtggtgtgtggcttctctacactgtggtcccatgtggacacgtctcagagctgccactccaggagacactgactttggcctgtggccatcgagtgcatctgttggaaggattttgtttgcaagtgacatagaaccgaatgtaaactggctaaacaaaaagggaattcaatgaaccccgtaattgaagggtcagaatagaaagtgctaccttcaggaatggtttgatccagaggatgaaacagcattccaagactgcttatttctctccatatctggctctgtgttgcctccttgctcagcaggttctctcttcatagtggcaagatggtagccccagcctcacattctctcaggctagctgacagctggctggggaaaagagaaatgttttctcccggtagcccttcctccagtgtcagaatttcttcatgctggttggatctttatgatcagttccgcattcctgcactgctgctggagccccagggcactgattggccacatctgcatcataggcttctgttctggaaacagagttctggaaagtgagtgtcaggaaggaggctgttcctctaaaggaaatcaaggtactttttttttttttgaggtggggtctcactctgtttcccaggctggagtgcaatggcgtcatcttggcttgctgcaacctccgcctcacaggttcaagcaatcctcatgcctcagcctcccaagtagctggaactacaggtgtgcaccaccatgcctggctaatttttttgtattttcagtagagatggggtttcaccacgttggccaggctggtctcgaactcctagcctcaagtgatccatccacctcagcctcccaaagtgctgggattacaggtgtgagccactgcaccgagccaaggtgctattttttaaaaggagggagctggatgctgggtggcaataataataataatgtatccattcctctgagctcctgaagtaacaggtgcagcctaatgaggggtccttggggaggattggtattgtgtggacccacatgagctgcagctgcatttcccagcatgtccttccctatgcagttcccagttcgcatgggttgggccacaagagacattccctgagatttgggaggcggaagtgacgcagcagccatcttctcagcattctggaggtccaaggcctccctggtactctgggagactgcataaaacacccattccatgatcccatctgaggtgaaggagttggggtattgatccaccagtgccacttggtaggggccatcccagaaggtgttaatcccctggcatttcctgatgaccatgaggtaggcacagttgcacactggagctttgcagaatgccctcaggtaaaaagatgcagaaactttaatttgcaggctatgggcagggcaccagcagtgcctcctacagagcactgattaagtcactactgagtgctctacaggtaaccccttcaaatcttagcaacagcttcaagaggcaattaggaacatccagattcacccgtgagcctcaggagcttgtccccccctgggaagatggaacagtagggatttgaacccaggatgtctgagccactgctttccccaacaaaactacacaaattcagtggggtcattccaggccaccaccaggccctgctaactcctcaaagaagaaaagccaggctgggcgcagtggctcacacctgtaatcccagcactttgggaggccgaggtgggtggatcgcctgaggtcaggagtttgagagcagcctggccaatatggtgaaatcccatctctactaaaaatacaaaaattacctgggcctggtggtgggcacctgtaatcccagctactcaggaggctgagacaggagaatttcttgaacctgggaggcggaagttgcagtgagctgagatcacgccactgcactccagcctgtgcaacagagcgagactccatcttaaaaaaaaaaaaagaagaagaagaagaagaaaagccgagagacccctggaccacctgcctttctgtggtcaccctctgggagtccctgctccggtaccctttgggtgcccaccgtgatcaacagtcaagtcctccccttctgcgacagtggctttttgcagtctcttctctggaatgtttttctgcagatactaatgaatgacccttcaatttcccaggaagggctgcctttttttgaagtggtttaagatctctgctcttgattgcaatcttccaagagctgattttggccacttggctctcatttctgaagtgatgatggggatgagaggggaggaaagcaagtggaagaaaagtgtgtgggctcagctagtctataggaattgtaatcccaggagacaattgagaattctaaaaatagagaaaagaactgttttcttttcagctctgtgaacaagttatccctggtttgtaccccaatatcagccacactcatcttgcacaaatcatgacttctcatgtaaaggtttgctactttttcccagtggtttttcataatttcaaacaaaattatttctagaagactcatcacttatttttaatattaaagtctgtaggatggccgagcgtggtagttcacacctgtaatcccagcactttgggaggccaaggcaggcagatcatttgaagccaggagttcaagaccagcatggccaacatgacaaaacccatctctactaaaaataaaaactaaaaaaatcagccaagcgtggtggcacgcacctataatcccaggtacttgggaggctgaggcacgaaaactgcttgaacctgggaggtggaggttgcagtgagctgagattgtgccactatactccagcctgggcaacagagtgaggctttgtctcaaaaaaaagaaaagaagaagaaaaaacgctatgggaagctggctatggtgtgcacctgtggtccccactactcaggaggctgaggtgggaggattgcttgagcccaggagttccaggctgaagttagccatgactgtgccactgcactccagcctggatgacagaatgagaccctatctctaaaaaaaaaaaaaaaatttaagtctattagaaaatgtgacttgagttggacaatttcatagcacatgtaatttttaagaagtccttgcttctaaatagcatatacctagataaaggcataattgaaaagtggaaaataaaagaatatatcagccaaaaatctcactgtgtatttctagtttgacttaaaaaatgtattatccaacataaaagttaagaacttaaaaattaaaaactttttttttatcaaaacactgccttaagtgagagaaaagtcaagccatagagtgggacaagatatttacaatatacatatccaacaatcaattcatatccagaatctattttttaaagtcttacaaatcaataaggaaaaagcagataagtcaatggaaaaatgagcaaaaagatgcaaatggacaataaacgtaggaagagaagctcaacctcatttgtcattaaagaaattctatttaatcacctgtcaagtcaactcaaaaaaataaaaaagaaaaaaaattataaccaaaaccacattacattattataaacccacaaaaacagctaaaacgaaaaggaaaaacaatgcaagggctagcaagaatttggagcaactgaaagcctcataccctgtgggtggactggcaaattggtacaaccactttggaaaactatagcagtatctatgagagcaaagacatgcattacctctggcccagcaattctgctctcagatatttacccatcagaaacaggtccctatgttcacccaaagacatgggccagaatgttcctagagcattattagtcgtgtcccatgtaaagtgcctggatgttcagcctggacatatagacaaatggagtgtagttcatttatgaatggaaattgataatggaatattcacaaacagaaatccatacagccatgtgaatgaacaagctattgcctcaccaacaatgtggacagttctcacaaacacagcatggacagaaagaagacagacacacaaaaatacacactcaatggtcccatacacataaagttcaaaaatgcgtggcatggtaaagggaggcagagagtggtaatccccagggagctgatgctggggagagtgcctgagggaggcctcctgggcgggtcagaaggctctgcttcttcctctgtgcatggatctatgcacattttaaagataaataaatacaaaaccgtactgcctttaaggcctcttctgctaacctggaaagcccagctgggttagtccggggggggtgcaagaaaagaagccctaacttgcaattcagagccaggaatcacacttatggccaccctgtgtctgaccttaatgagagaggctgtggctttaggtccttagcagctcatctcaggaaagagaacttgttgtcctgtgtcccagctatcttgtcacacctgggctctcacgcagctcctgctccagctcagtttgttccctaggtcagagctttggtgactgtcacccaggcccctgtccaagttctggcctcatggcactaatcccccacgtagccagtggctagctgtgcaacctagagccagttagaaatgtggcttaaggtgatctgaatccttccagaacattagccctgccccctgtggagtccctgagaagagaaatgccccacgagtgacaaagaaggcaaagtatctcctcactgtgtgctggagtcaggccccaggccctggcacagagagctctgatccaccaagccagaagacctagggcccagtggaggccagggcaagtgcctgcctggggtgtgagtgtcttccacaccatgcaggattcccttcaggtcctggggaactgtcaacagagcggaggagctcctattcacccacagacacacacacaccccgtaacacacacacaagtgcacacccatacacatctgcaggcatagatacaggtctgctcatacacacatgcacacacgtacacgaatatcctttacactagacacacatgtgctcacagacacccttgcaatggtgtgcatgcacacacgcatgcacttagagatgcacacacactcacgtagcacttgccagacactattctgagcactttccatatattaactaatttaatccttataaccactccatgaggtccagatatcaatcccactttgcagataagaaaattgaggcccagagaggttaagtcacttgttcagagtaatgcatttgaagcctggcagcttggccttagagtatgtaccttttttttctttttttcttttgagtctcgctctgtcgcccaggctagagtgcagtggcgccatctcagctcattgcaagctccaactcccaggttcagattctcccacctcagactcctgagtagctggaactatgggagcccaccaacacgccctgctaatttttgtatttttagtagaggcaaagtttcaccatgcttgccaggtgaaactcctgacctcaagtgatccacctgcctcggcctcccaaactgctcggattacaggcatgagccactcatacctggctgagtatgtggttttctatgcgaatctccattcacagacaaatgcacaaagacacttgggcctttggacacacacactcccacatgcatgtacacacatgcacagacacatgtgcacacttgcgatcaaccctcccacacatataagcacacacacttctttctgctgcctcccccctcacttcctggcctctctgcctcccactgactcctggtagaaggagtgagagcccctctccccccggccttgccaggcagctgggactcctggctccttgtctgaaacaaacccagggccagcactgtcttcctcgtgccctgcaagtgggagggaagccccagctcatccagctctgttggctactctggttccctcatcaccttgtgagacaaataagacctgttctccgtgttcaatggggaaactgaggcccggaaggaaaaacgagtggcccaaagtcaccctgagtcatggcagggctgggctgtgggtatgcaggcccctggtcccaggccaggctctcctagggctcagacgatacctttgaagagccaagcaggggtgggtgcagcccagagaagtgggcctccctctgactctctggccttaggcactaaagccttccccaggagcccagaaagataagtgcctttctacctggcaaggccccagtgggagtggtggcattctgaaggggctgtcacaactctcagcagtcatgctaaagccccaggtcaggggctgagggatgacttcctgcctgacgtgcccctctgccacatccctccctctctaagagttccccagggtctggccccacgggaagactttctatttcacaccagcctaaccccaagtggcacagcggccggcacagcgactggggccatacatctcagcttccactcctgagttctggacttctcccacaccctttgtgtggctggaggttttatgagaaggccaaaaaagaaaaaagaaaaaaatgaaaaacaaaaaaaaataaattacttgggaatttgtttttaattaagcaataagcctcgatggggcttggctgctgcctcataaaactgctcccggggtgtggggaggcatttggtccagatgagtgcctcaaatcagcccggaatgtgatgagatgattactccccggagttcgtacaagatgagcttctccagtgctgtcttattgctattataaaaagtctgcaggcagtgggggagaaaagctgtggtgctgcttggagaagaagaaaacaccaatgctggctgtcagggccagagctcagccccccacccttccttcaccacatctgctcacatggcggaacccatgggtggcccacaatggaatggaggctgacatccttaacaaaaaatgggtccccgtacacagcgaatgggatgtttcagcagagacacaaacaagaaggatgcgagggacccttacttggagatattttctcctgtcctgccaggagcaagcaaccacgctcactcccagggcagctcaattcatctcactaatgctacaacctacaagcatgcatggctaggaattctgaggcttctctctctctctctctctccccccgtcctgcccccagtcagcttaccaggggaaggaatttttgctttctgggtcatgcgctggcctagccttcactgtgctaggtctggataataaatgaaggaaaaagaaaacccaagacactagagaggtgaaattgacctacgtaataaaacggctgagatggaacaagatgagaaggtaaggaaatggtaagccgccctggctgagcactggggagaatttgggaaactgggagacaagaatggcgaagaaaaggagtctcgaagatccgtcaccatcagctaggaggatggaacaagcagatggagaggaaggagttttaaacatttgctgagccttaagaatatatgttttcttgtggcatttcttcaagaaacagagtacagacttataaatactttcaattattttgtgatgtagatcgatccttctctgactatgatacacacagggactaggctatttgagaccctggttatatttgaattaaattagcaagcatgggccgggcccggtggctcacgcctgtaatcccaaccctttgggaggccgaggcggggggatcacctgaggttgggagtttgagaccagcctgaccaacatggagaaaccccgtctctactaaaaatacaacattagccgggcatggtggcacatgcctgtaatcccaggtactagggagcctgaggcaggagaatcacttgaacccaggaggtggaggttgtggtgagccgagagagatcacaccactgcactccagcctgggcaacaagagcaaaactctgtctcaaaaagaaaaaatctagcaagcataaagacaggagtaggaagatttagggaatgcaggagggtaagggggtaagggatagaaacccctatgaaaagctaagggccgggcgcagtggctcatgtctataatcccagataatctggaagcggaagcggaaggatcacttgaagccaggagttcaagaccagcctgggcaacatagcaagacccctgtctctacaaaaaatatcagttatccaggtgtgatggcacacacctgtggtcccagctacttgggagcctgaggcaggaggattgcttgagttcgaggctgcagtgaactatgattgcgccactgcactccagcctggcaacagagcaagactctgtctctctaaaaaaaaaaaaaaaaaagaatttgagatgatgtccagacaaagacagaacatgaatgaatgaccatataggaacttgccagagagaagcagacgtgccccaggtaaggtgaggcctggttcatgcacatgaacagcccagggcaagtgctctagagtcagacagcccagatgcgagtgtcagctctgccacttgggaaagtccttaaaactcttctcatctgcgaagagatcaaccatgagattggtcatagaactaacttcaccgggatgttgtaaggcttgagtgcactgtctatggaagcacttagcacactgcctagcacatcgcaaatgcccggtaagtgactggtattgctacttgagtggaaaaaacacaaactatttttcctctgctctcccccacgataatcaacacagaagactgaccaaatatgagggggttttccccgcacacccagaaagcaatcggtcctgcagcggacgctaacagggtgtcctttacttcaattctgacaccatctacctggagatcccacaggtgaggggtccatccccaacactgcctccacttctggggccaattgcaaactccagttattcttcctgtgctgctgccctgctgactataaatcggggttcccacaaccccttcctggggttcaattaatttgccagagcagctcacagaacccagggaaacacattcaccagtttatcacacaggctattgtaaaagaataaacagccagatgaaggggtatgtacagccaggctgggaagggtccccaagcacaggagcttctgttcccgtggagttgggagcaccaccctcccagctcatgaatgcacagtattaatgaatatatagaatatcagctttcaattaagctgacttctgcccgtagagctctttaaaaaaaaaaaaacttttcagagctcaggcacagtggctcatgcctgtaatcccagcactttgggaggctgaggcaggtggatcacttgaggtcaggagttccagaccagcctggccaacacgatgaagcctcgtcactactgaaaatacaaaaattagctgggcggggtggtgggcacctgtaatcccagctactcgggaggctgaggcaggagaatagcttgaatccgggaggcggaggttgcggtgagccgaggtggcgcctttgctctccagcctgggccacagacagagcgagagtctgtctcaaaaacaacaacaacaaaacaaacaaacaaaaacgtttcaggtcaggcacggtggctcacttctgtaatcccagtgttagtagtggaagttatccgtgttccccaaaatatgttaccggcggcgaatccgtacgggtctgcagcagcctcaattcttgcctccccagcagaaagaattcgaatgaggggcggaaggcagaagaaaagaccaaagcaagtttcagagcaggagtggaagtttattagagcaggaacaaaagtaaagaaagtacacttggaagaggcccaagcaggcgacttgaaggacaagtgcggggtttcaccttttgacttggggtcttacacgtcggcatacctgtggggtcttacagcacttctcccctgatgttgccggtgggttgggctgtccacaggcaccgtggcctgctagcgcttgggagaggagcatgcgcagtgtgtttactggagttgtacgcatgctcacttgaggcgttctccccataatctagccttcctaggcgaaggccatagaccagttaaacaccaccattttgcctcttaatgtgcgtgattgagcccagctgcccaactcctgagattttttttttttttttttttaatgatgggggatttccaatccgccgtgctgactcttttttctttctttctttcttttttttttaagaacggagtctctcactgtcgcccaggctggagtgcagtggcgtgatctcggctcactgcaacctcgacctcccggcttcaagcgattctcttgcctcagcctcccgagtagctgggactacaggcacatgccagcacgcctggctatttttttgtatttttagtagagatgggtttcaccgtgttagtcaggttggtcttgatatcctgacctcgtgatctgcccacctcccaaggtgctgggattacaggcgtgagccactgcgcccggccccaacttctgggatcttatcgagaagctgctgatgaccagcttcaggttttttctatctatagggagaccgcctttccctggcactggctgcgaccaattattattttagagagacagtgtaacaactgcctgaccatcacctgatgatcgcctgacattcctggtggggtggggtcctcttttgccctgccatccactgtaacacccagcactgtgggaggccaaggtgggaggatcacttgagcccaggagttcaagacgagcctggacaagaaggtgagacctccatctcttaaataaagaaagaaagaaaacttttcaaatttctaattatcagtttttacccaagacaaattcctggctttttcacttttttaccaaaggtaccctcctacttcacaagatccagaaccaccccaaaagacatctcaaagaaaagaaacggctggggacagtggctaatgcctgaaatcccagcactttgggaggccgaggtgggaggactgcttgagcccaggagttcgagaccagcctgagcaatatagggagacctcatctctacaaaaaaaaaaaattaaaattagctgagcgtggtggtgtacacctttggtcccagcgacttgggaggctgaggtgggaggatcacttaagcccaagaggtggaggctgcagtgagccatgagtctgccattacaatccatactgggcaacagagcaagacgctgtcagaaaaggaagaaagagaagcagaagaggaggaggaggaggagaaaagaagaaggaggtgaaggaggaggaaagaagaaaaagaggaagaagaggaagaggaggaagcagaagaagtggaagaagaagatggaggaggagaaagaggaggagaaggagaaggaggggaaagaaaggagagttttggtagctgttagggtctcagcttctcagctaaccatctacacacaaaggctctaaagtcccgtatctccccacagacaggaaatcaaaagctatctgtggaaaaggatcaataacaaatggatacccccaaagtcaaaggtcatacaaatgtcaaactaaaagggactgattccctaactggaaagcaaatccaggccatggcagagggagcatggaattttagctaaactacaaggtggagcagccttcactgtgagtcccacaggggacccaccgtgggtggtttagcagacaaaggattgtaactttgttttaagtgagatttttactctttaattgagctgagagagttgctaaggctagccgtgacactatattcttcctttcatttaatcttcccataaatacaaataaagcaattgtttagaatgagagatctctaatttttttaagatttaggagtttttctcattgaaaggatccatcttttggccactaatgagaatttcctagggtgtacttcttccgatagtgactcaatccaatagcctcttcatggaaaccccagggtgtgattttccaggtttaaaacaagttgtttcctggagaaggcaatatcaaagatttcctccaaaaaaattcactcctaggaatagtctaacatagaaaaagactcttttttttttttttttcctgtgagccagcatcttgttctgtcaccaggctggagtatggtggcatgatcatagctcactgcagcctcaaactccagggcttaagtgatcctcccacctcagccttccaagtagctgaggccacaagtgtgtaccaccatgcctggctaattttttttacattttgtagagtcaggatcttgctatgttgcccaggctggtctcaaactcctagcctcaagtgatcctcccacctctgccatccgaagtgctgggattagaggcatgagccaccatacataaccacaaaagactcttgttgccacagatggttaaggatgatgtttgcacgtaagatgcctccagtaacccacaaatttgtggagagccaccagacacaaactcgttaatctgtgaaaccaggcaggccctcctaggattgggttttcccaggactaacgaggcaacaagggttgagacaacagaagtcacctaggatgagatctctttttttttttttttggtggtggggggtgcaggggggaacagggtctccctctgtcacccaggctggagtgcagtggctcaatctcagctcactgcagcctccacctcccagtttcaagtgattctcatccctcagcctcccatgtagctgggatcacaggtgtgcaataccacgaccagctaatttttgtatttttagtagaaacggggtttcgctatgttggccaggctggtctcgaactcctggcctccagtgatctgcccacctcggcctcccaaagtgctgggattacaggcatgagccaccgtgcccagccaggatgggatctcttaagataaactttcctgagagcttgacacattcagaacaagatatgtgctgcttaaaatcttaacatgtctcggacttccagccattttcagactggccacctgacatgacctattaatatcagtccccagaggcagagacaagagagtgttcccacttggtcataagtcaagctctcaagaacataaaacaagatgagaaggaacctcatctggtttttattttggggaccaacagtgaagtttatattccagcccaaccagaaaaacaaactgaccagtctgcagggctggctggaacaaccagcttgagagcgttctgcattgtgtcccccacattggcagagcgacatttgaaccagagtgactccatcttgaataggctctctaggtaaaataaggctgagacctactgggctgcattcccaggaggttaaggcattcataatcacaggatgagacaggaggtcggcaaaagatacaggtcacaaagtacttgctgataaaacagcatgcaggccgggcgcagtggctcacacctataatcccagcactttgggaggccaaggcaggcggatcacctgaggtcaggagttcgagaccagcctgatcaacatggtaaaaccccgtctctactataaaatacaaaattcagccgggcgtagtggcagccacctgtaatcccagctactcgggaggcagaggtaggaggatcgcttgaacccgggaggcagaagttgcagtgagccgagatcgagccattgcattccagcctgggccgcagagcaagactccgtctcaaaaacaaaacaaaacaaaacaccagcatgcagtaaagaagccggccaaatcccacaaaaccaagatggcaatgaaggtggcctctggtcttcctcactgctcattatacgctaggtataatgcattagcatgctaaaagacactcccaccagcaccatgatggtttacagatgccatggcaacgtcaggaagttaccctatatggtctaaaaagggaaggtgccctcagctccgggaattacccaggcctttcctagaaaactcatgaataacccaccccttgtttagcatataatcaagaaataacataaaaataggcaaccagcagccctccgtactgccctgcctacggagtaacaattctttattcctttactttcttttcctttctttctttttttttttttttgagacagagtttcgttcttgtcacccaggatggagtgcactggcgtgctctcagctcactgcaacctccacctcccaggtttgagcgattctcctgcctcagcctcctgagtagctaggattacaggcacctgccaccatgcccggctaatttttgtatttttagtagagatggggtcaccatgttggccaaggtgatcttgaactcctggcctcaagtaatccacccgcctcccaaagtgctgggattacaggcatgagccaccacgcccggccttattcctttactttcttaattactttcactttactctatggattcatcttgaattctttcttgcgcgagatccaagaaccctctcttggggtctggatcgggaccgctttccggtaacactatgggaccccttgttatgacagagcaacaaaaaaagacaaaaacaaaggaaaggactatttctgggaggaaaaaagatcaaacaatagtaatattcctaccaaaaagtacaccagagttgccacacccaagactagccacacaaatccttttctcccatcaatcaaaattttgcagagagaaaaacgacagtcatttttactatttgcttgactggattttacagagagaggctgggagcccggctggtaagaaattcttacccttctgccagtttgtcaggtcctgggtttccttcactgcagctcccaggagagcagaatggtgtcagtctcctgctcacagtgccaaaactgtaggggccgagggacaatttctccttctccctctgaaggtttgctggaaaatcaactgaacaaggcagattaattagagaaaaggcatgcacatgtattaacatgcacgcggaggagaaccacagagtgattatcctacccaccgtgctgtacagaagcttatatgccatgttggggttacagaaaaaacaggcagagggggcactcagagcacgtccaaaaatggcttatggcagcaaatcaggttatagcggcaaatcaggttatagcggcaaggagggattggaggggaagaagagaagtcctggctagcataggtgggcttgttatgcagatgaagcctcccaggtagcagtcctcagaatagatggtgtttcctaaagacttttaaaggcgtcagattctttcctagatctggacagggaagagactcagagaaaacctggctgcattagtgcagatgttttttctatagatgcaaatctcccacataaaagacagctttgccacttctgttcacaggccctctgaacagtcatctcagaatatgtcaaagaagtgtattttggggtgaaatattttgatttccttcacccctaaagagaaattcaacccaaatcagccaaaaactgtgttgagccactactgtgggtgtgcacaacgggaacggagcccaatttcctgtccccgggcctgatagccagggagccaaaaccacagagagaaattgtatcgtgccaagagatagagcaggaacacgaaagagcatgggcacttcggaagtgtgtgaaaagagtgagaagtgtatccagctcgtgcagcctaggagatgcagcttgccaagtggagtgaatgctgcctttcagtgctctcacctctgctgggcatgtttgtgcagtggccaacttgctcaaccgtatgcaatgaccttgaaaagaagtctcctctctgagcttagaactgagtaatgtctcaaactgaaagagaataaatacatgctggatttgagtttgatgagacgctgcccattgagaaaatctgttctatgccttatgggattaattcaggaataagtaaattgagtaaagagatttgaactccagatattcaaagagctcttgacaaggtgaaaccctgcctctgattgagactgactagagccggggtcctgtgtgaccttgatgctgatgtaggggatgtgggataggacagggaaatcagggcaatcttaataccagagaaagaaaacaagggattcacttttttttttttttttgagacggagtttcgctcttgttgcccagtctggagtgcaatggtaggatctcggctcactgcaacctcttcctcctgggttcaagcaattctcctgcctcagcctcctgagtagctgggattacaggcatagtgccaccacacctggctaatttttttttgtatttttagtagagatggggtttcaccatgttggtcaggttggtctcgaactcctgacctcaggtgatccacccacctcagcctcccaaagtgctggtattacaggtgtgagccactgtgcccagcctgggattctttttttttttttttttcttttttgagatggagttttgctcttgttgcccaggctggagtgcagtggcgcaatctcggctcactgtaacctccacctcctgggttcaactgattctcttgcctcagcctctctagtagctaggattacaggcgcccaccaccacgcccagctaattttttgtatttttagtagagaaggggtttcactatgttggccaggctggtcttgaactcctgacctcaggtgatctgcccaccttggcctcccaaagtgctgggattacaggcatgagccactgcgcccggcaggcattcactttcttaaacaggatatagatattccaaaatcacaccctggtcacaacacaggaaacagtaataagagtaactgatccttacgcatggttgctatgtgcgtatgctgccttagacagttcccaggtgttaattcatccacttggagctctgcccatctctaccttgaagaagctgctgttcagtctttcacttcatgcccagtcccctgggcctccagatgctcagaaaccctcagtcctgtctgaggcagactccaggcttttaaaaaccctagatggctaaaatgaaatagctaaaagagatcccagtgcctgcctccgggacaagaagaaaggagaggtgaaggcagagaattcacaacaagcctttggggaccgatgtttcatttggtttttttaactttcaatttaatttgatggaacatctgaggattccttgttgctgttgttttttctgttgtttgtttagaacaagttttttattatttatttttatttatttattttttgagaccaagtcttgctctgttgcccaggctggaggtgagaggtgggggccgtgttaagaactaggctcaggcaggtgcagtggctcatgcctgcagccccaacacttttggatgacgaggtgggaggatcacttgagcccaggagttcgagacaagcctgggcaagatagtgagatcctgtctctacagaaataaaaataaaaataaaaaaattagctgggcatggtggcacacacgtgtagtcccagttacttgggaggccaaggtgggaggatcgcttgagcccaggagtttgagaccaccctgggtaacataatgagacctcgtctctacaaaaaatttaaaaattagctaggtatggtatgtgcctgtagtaccagctactcgggagtttgagtcaggaagattccttgagcccaggactcaaccacaactgtaccacagcactccagctggggcaacagagcaagaccccatctctttttaaaaagtttaaaaaaggaaaaaagaaaagaggaccaagctcatttctggaatcttgtttctcttaattctagttgccccttttgaaagatttttagcaagatagtttgcccttgctttgtggggcaatttctatgcctgggttgtttcttgttttgtgtattttttctagtttcgctctatttcttttgatataaaaggtttgggagttttattgtttgggtgggttatgtttttttatttttgtctttgattttgtgatttacttgtttttacttattcagggtcctctttgggaaggtttaggagagggaggctccgaggttgagcttcctcctctgccttcttagccaggaaattccctcttgtgacttcagaaaagagaagggaagttctgacccccagcatctcaggaaagctgaagaatcccttaggagggcattagaggaacttgcccaaaaacatattaggagagagagaggttcaggcaatgacagattgtgcttccttttttcttttttttttttttagatggagtctcgctctgtcgccaggctggagtgcagtgacactatctcagctcactgcaacctctgccttctgggttcaagcgattctcctgcctcagcctcccaagtaactgggactacaggcacgcaccaccatgcccaattaatttttgtatttttagtagagacggggtttcactatgttggccaggctggttgaactcctgacctcgtgatccgcccacctcggcctcccaaaatgctgggattacatgcatgagccaccgcgccgggccttgtgcttgctttttttttccccctcttgtaacaataggtaacttggaagatttccagtgtgaccttcattcgtgcctaggtggccaccaaaccccaactccaaggccttgccagttttttaaaattctaacacattgaacgaaataatggcattcccagcaacctggatggaattggagaccattattcttttttttttgagacggagtctcgttctgtatccaggctggagtgcagtggcgcaatcttggctcactgcaacctccgcctccggggctcaagcaattctcctgccttagcctaccgagtagctgggattacaggtgtgcgccaccacgcccagctaatttttgtatttttagcagagacgggatttcatcatgttggcctcgatctcttgacctcgtgatccacccacctcagccttccaaagtgctgggattacaggcgtcagccactgctcccagctattattcaaagtgatctaactcaagaatggaaaagcaaacatcttatgttctcattcataagtgggatcaaagctatgagagcacaaaggcataagaataattcagtggagtttggggactcatgggaaagagtgggatggggtgagggataaaagactacacattgggtacagtgtagatggcttgggtgaaaggtgaaccaaaatctcagaaatcaccaccaaagaacttatccatgtagccaaacaccacccgttccccaaaaacgattgaaataaaaaaaaaaccttaaatactaaaaataaaatataaaattctaacacattaaacttttgaaacatatgtgcacacacacacacacacacacacaaatcctaattaatcagcaaccatgtaaagaacaaatgtgggaaatgctgtatatgctatgagaatttcaattacaaatgacaacgttatacattttactaatatttgcttttgctttaaaaattttaaaatttacattaaatgtaattctttagtgtacaattctatttgttttggcaaatacataaagtagtgtaactactctgtcaacaaagagtcaaacttggccaggtgcggtggctcacgcctctatcagcacttagggaggccaatgcaggcgattacttgaggacaggagtttgagaccagcctggccaacatgatgaaaccccatgtctactaaaaatataaaatattagctgggtgtgttggcgtgtgcctgtaatcccagctactaaggaggctgaggcaggagaatcactggagcctgggaggcagaggttgcagtgagctgagatcacaccactgtaccgcaggcctgtgtgacagagcaagactccatctcaaaggagtttaaaaaaagaatcagactctgtaaaatattttaacagatttattctgagccaaatatgagtggccagtggcctgtgacacagccctcaggaggtcttgagaacatgtgtccagggtgttcagggcccagcctagttttgtacatttttaggagacaggaaacatcatgcaagatatacattggttcagtccagaaaagtgggacaactgaaagtggggggactcgagcttataggtagatttttaaattgtctgatttgcaatgggtttaaagagttattatcaatagaaaggaatgtctgggttacaaaaaggggttgtagagatcaaattttatcacgcagaggaagcctccaggtagcaggcttcagagaaaagagattgtaaatgtttcttagcacacttaaggtctgtgttgatgttaagtaggtacaaaagtaatttgccatgacctttaatgacaaaaaccacaattacttttgtagcaacctaataaatgctggtcagcttttcctgaattccaagagggaggagggtataatgaggcacgtcctctcatcatggcctgaacccgtttttcaggttaattttggagtggcttggctgagaggaggggtccatttagactgttagggggcctttgaattttatttttggttaacaactcccacaatcaaaatacaaaagagttttccatcatcccaaactcccacccgctccccccccgcacccccccaccgccccatgctacccgttgtggctaccccacccccaagcagaagctactgctgatcagtcatccatcctgacagttctgccttttgagagtgccatagaaatgataacgtagaatatgtagcccttggagtctggcagtttttctcttagcataatgtgtttgagattcattcttattgctgggttagtagtttgtttcttattatggttgaggtcctcttcatttcattgcttggataccatattttattcatccattccacacttgacggctatttgggtcatttccaatttttgcggggtttttttgtttgttttttgttctttttgcccaggctggagtgcagtgacattatcttggctcatggcaacctctgcctcctaggttcaaatgattctcctgcctcagcctccctagtagctgggattacaggcgtgtgccaccatgcttgcctaacttttatatttttagtagagacggggtttcaccacattggccaggctggttggtctcgaaccctgacctcaggtgatccacaccccctcagcctcccaaagtgctgggatgacaggcatgagccaccgtgtctggcctaatttttgttttttagccataaagctattaaaagcattggttaacaggattttttgtgtgaacggaagtttttatttatcttgagtaaccatctaggtgtgagattgctgtatcatctggggagagtaggtttaactttgtaagaaactggcaaactgtctctgaagtggttgtgtcctattgtgttcctagtagcaatgtatgaaagatacagttgtcttgcatactgtccagaacttggtattcgcattatgggtttggtttggtttttatagccattcagatagatatgtagtataatagtatctcattgtggttttaatttgcattttcctaatgtctaatgattttgagcatttttcatgcctttatttgtcattcatatatcttctttgctaaagtgtctgttgaaatatttgctcattttgtgctgtttttgagacagggtctcactctgttgcccaggctgaagtccagtggtgcgatcgtggctcactgcaacctctgcctcccaggctcaagttgttctcccacctcagcctcccgagtagctaggagtaaagatgtgtgccaccatgcccagctaatttttttgtattttttgtagaaatagggtttcaccatgttgcttaggctagattttgtctgtttttaaattaagctgttttttctttttgttgggttcttcatatattctgaatacaagccctttgtcagatatatgatttgcagatatttacccctagtgtgtggcttttctttattttaacagtgtctttcacagagcaaagtttaattttgatgaggcataatttatcttcttttttctttatggattatgtttttggtgtctaagaacactttgcctaacccaaggtcatgaagattttctccaatgttttcttctaaagaatttatagtttgatgtttcacactcaggtcaaaaattcattttgcgtttgttattgtttaagtgtcttagttcatttgaccacaaacggggtaatttagaaataatggaagtatatttcacatcgttctcaaggctgtgaactccaagatgcaggtacaagcatattgagtttccagtgaagccccagtctgtgcttccaagatggtgcctcaaacactgtgttctcacatagcagagagtggaagggtaaagggtctaagctagttccttccagcccttttattaggcactaatacattactgagggtggaggctgcgtgacttaatcacttcacaagagatcccacctcttagttccaccacagtggggattgtctcaacacatgaattttggggaacatccagaacatagcaataaggcatgagatgtaggtcaaggtacatttatttgcatatggatgtctaattattccaggaccatttgatgaaagcactgttcttcctccattaattctgtttgcacctttgttaaaaatcaattgatcatattcatgtgggtctattgttggactctatattctgttccattgatcaatttgtatatccttcgagaaatatcacattgtctcaataactacagctttatagtgagaagtagtgggtgttgcacttttgctctttttttctgaaatgttttggtgattctacttcctttgccttttcccacaaagggtgtgtgtgtgtttgtgtgtgtgtgtgtgtttgagacagggtctcactacatcacccaggctgctagaatacagtggcatcatctcggctcattggactctgcctcccaggttcaagcaactataggcatgcaccaccatgccaggctaatttttgtaatttccgtagaggcagaggtctccctatagtgccaaaactggtcttgaactcctgggctcatgcaatttgcctgcctcggccacccaaaatgttgggttacagatgtgagccaccgcacctggcctcccataaattttagaatcactttgtcaatatctgaaaaaaaaaaaaaaaacctgctacacttttgatcgggattgtgttgaatgtatatacaccaagttagggagaagtgaaattttaacaatatcaagttttccaatccacgtatgtattatatgtctacatttatttaagttttctttgatttctttatttttcaaaatttttttgtcttctccgggtcagagttgaattatttgatttctttagttcatgttttgtagttttcagcatacaaatcctgcatgtgttttgttagacttatagcaaagcattccatcttttggtgctgttgtagatggtactgtttttaaatttgttattctcaattttttattgctacatatagaaatataattgggttttgcatattgaccttgttcctgtgtacttgctaagctcacttataagttctgggaagtacttgtaaattccttgagattttctatgcagaccagcaaatcatatgacaatagagaaaaatttatttctttttgacttatatgccttttatttctttttcttgctttattgcactggctaggactttaggaacaatgtttagcctattgatatggtgaattaccttaattgattatttaaaatgttgaatcaaccttgaattcctagtataaacccaacttggtcaccttgtgttatctcttaaaaatattgctagatttaatatgctaatattttgttgaggatttttgcatctaagtttatgaaggatgttggtctgcaattttcttttcttatactgtcttgttctggctttggcattaaggtaatgctggtctcataaaattttccggaagaaattttgtagcattgttattaatttcttcctttaatgtttgataacattcaccagtgagatcatccggcatggagctctttgttgttgttgttgttgttgtatggcttttccatacaaaataaacttctttaatagctataatgtttttcaagttatctcttttttcttaagaaagtcttaatggtttatgtttttcaaggaattggttcatttcatctaagttgtcaaattcatggacatagatttattcatactatttattttttaacgtctatagggtctatagtaatattgcctctcattcctgatattagtaatttgtgttttctctcttttttcttcatcagtccaactagaagtatatcaattttattaatcttttcaaaaatcctgatttgggatttctttgctgttttttagttttcctattttatttatgtctactccaatttttattatttcctttcttctaaatactttggacttagtttgttcttttttatcccatttttttaaggtggaaactcagataattgatttgaggccttttttccattcattgtggaagcgtttaccttcacctcctggagaatggtataatcatggggacatttgctcccaagacagaagtttgctctctttatccattttctcagaataaaagacctccccgcttctgtcttccaaggattataagcaaggaggttttatggggcgtttatgaagatgctgctggagtttgtcttaagaaacaggaataaaatgcatcatgaaaaagatggtgatttttatgtctcaagaaaacatccctaagatgtgaaaagaagacgtatgaaagctctcccatcacttcagctggagaggagacagtgagggttggggcaacagaaagcaaagtggggaggaacaaaggtgggggatctagagacttaaaagctgcctagagattggagtcttgagtgataggagaagtacccactggtgtctgtgtcttagtcaaggtcttcctagaagcagacaccaagacagatggacttggggacatcagtgaaggataaagaagaggtagtcagaaaagatggagagacccttcagatgactttgccagcctgacaccaggagaaaggaagaagagtctcaaactgcagtacagttccaagaaagtgtcagtcaggccagtggggaatccctgagtcaaggtaacccaaggtcccacatctcacaaagatggaccagtctcagcacccatcatgctcagacattgactggcagcagcctggaggaagttgggcgctggcactaacacagtggtaggtccccaaagagagcatgtggggctatcagtcaaccacactctcacagcagaagggtgagccatgcattttcatggctgccaccacagtatggggacagggaacagtgtgggggtaaaaagcctaataatgcatgctctcctttgtcctgagctgctcaacccaaccccaactccaggggcactctggaaaaggcacctgggcccctgcttcgggaaaaagaggaaacatcatgagagggcacctcctgcaggaactgcaaatgcaaggcaaacttgtcagcctccagaggcctcagggagggcagccaaggtgggtgacagcagggagccgggggctgtgcaggagcaggatgggcacatcctctaagagcactcaagctcagatttttgggtaggggggcttttatcctattttattttattgatgtataatatacatacaataaagtgcacgaatcttatgtgtatagtttgataatgttttttttttgagatggagtcttactctgtcacccaggctggagtacaatggcatggtctcagctcactgcaacctctgcctcccgggttcaagcggttctcccacctcagcctcccgagtagctgggactacaggcatgtgccaccacaccccgctaatttttgtatttttagtagagacgggtttcactatgttggccaggctgatctcaaactcctgacctcgtgatccacccacctcagcctcccaaagtgctgggattacaagcgtaagccaccgtgcccggccttagtttgataatttttttacacatattgtcagcattcatcattttagcaattctggtgaatgtcaagtttagatttattgattgatttatttatttttgagacagtgttttgctcttgttgcccaagctggagtgcaatggtgcgatctcggctcactgcaacctccgcctcctgggttcaagtgattctcctgtctcagcctcccaagtagctgggattacaggtgcacaccaccacacccagctatttttttgtattttgaatagaaacagggtttcaccattttagccaggctggtcttgaactcctgacctcaggtgatccacccacctcggcctcccaaagtgctgggattacagacgtgagccactgtgcccggcccaagtttagatttttaaaatccagcatgctagccaagcaaaacggaactgtgggacctgcaggcagccagtgtgaaaacctcacacctaggagtttttcattgcctgtacaggtgcccacagcacacacacatctggaagtcaggcctctcctccacttctctgaatactcaggtgcagtccctccagagggcagggctcattgcccttgcagtggatcccatctctccagcccatgtctacacagttttaatattcccaaattatcaatcacacaaggtgatggtatgtattaggttattgttatcatcatcatcatcaccaccaccactgttaggatgcacaaatgcaaaaggtacaaaattcaaaagacagaacacgatgtatgagttatcggttgctgcctaacaaattacctcaaaatgtagtgtcttgaagcctgggcaacatagtaagacgctaagacactgtctctacaaaaagtaaaaccagccaggtgtgggggcatgcacctgtcatcccagctactcaggaggctgaggtgggaggatcacttgagcccaagagtttgaggctgcacatgagccatgattgcaccactacagtccatcctgggtgacagagcaataccctgtctttaaaaagaaaaaaaaactagttggtggcttgaaacaatacatacttatacggtatcacagggcttctgcagggcaggagccagggaatggcccagctggatggctctgcctctaggtctcccatgaggttgcagctaagatgctggtctaagccatgatcacctcaaggctttctggggctgaacagtcttccaagagtcttcctcacccctagcaaggggttggtcgctgttggctggaggcctcagtgtctcccatgggcttctccggagggctgcatggacctcttcatgactcagcagccagcttcccctggagtgagtgatcctaggaagcaaggcagaggccacaatgttctttatgacctagacctggaagccacgctctgtcatttccacagtatcctgttggttacagaggtaaatcctattccctgtggaagagaactataccagggcgtgaataccacaagggtgccaggcatggtggctcacacatgcaatcccagcactttgggaggccgaggcgggcagatagcttgagcccaagagttccagaccagcctggacaacatggtgaaactctgaatctactaaaatagaaaaattagccaggtgtggtggtgtgcacctgtaatcccagctacttggggggctgaggtgggaggattgcttgggcccaggaggtagaggttgcagtgagccatgatcgtgccactgcactccaaccaaggcaacagagcaagactcagtctcaaaaaacaaaaacaaaaacaaaaacaaaaccacacacacacacacacacacacacacacacataacaaaacaacagcaacaaaacaaacaaaaataccacaagtgtatacagtaaatgggaatctccctcccacccattttcccttccagaggcaaacccatgaccagtttattgtgaattctgccagcaatacacacacacacacacacacacactctcacacactcacactatgcgtccacttgtataccttacttttttttactcagtatatcctagaaatccttgcatttcaggacatgaagacctgccttatttcctgaaactgtgggaagccattccattgtatgaatgactcgtaatttctttggccggcccctgtcagtggatattagggctgctccctgcatttccctactgtaagcaatgccacaataaatgaatgagtgtttatatccttttgcacaaggacaggagtatttaaggataaattctggaagtggaccagctggagaaaaaagagcctgtgctttttttttttctttttgacagagtcttactctgtcacccagggtggagtgcagtggcatgatcttggctcaccgcaacctccatctcctgagttcaagcaattcttctgcctcggcctcccaagtagctgggactacaggcacccgccaccatgcccacctaatttttttttctttttaagacgtagtcttgctctgttgcccaggctggagtgcagtggtgcgatctcagctcactgcaacctccgcctcctggggtcaagcaattcccctgccttagcctcccaagcaactgggattacaggcatgcaccatcacgcctggctaatttttgtattcttagtagagacagggtttcaccatgttggccaggctggtctcgaactcttgacctcatgatctgcccgcctcggtctcccaaagtgctgggattacaggcatgagccaccgcacccggctcttgcccagctaatttttgtatttttagtagacgggatttcgcatgttggccaggctggtctcgaactcctgacctcaggtgacccgcctgcctcagccttctgaagtgctggaattacaggtgtgagccactgtgtccggccaagtctgtacattttaaaatttgatcgatgttgccacattgccccccatgaaggttggttgtaaaaatttatgctctcaccagcaagaaaatggatttatgaaggcttgggtggtaatggccaaaatgtagggcattccctgggcagttcagtaagtaattaaaaatggaatatcacctgtccgggtgcagtggctcatgtctgtaatcccagcactttgggaggccaaggcaggaggatcacttgagaccaggagtttgagaccagcctaggcaacatagcaagacctgtatctcaataaaaaatttaaaaattagctgggagtagtggcgtgcacctgaagtcccaactactcaagaggctgaggcaggaggattacttgagcccagaagttcaagactgcagtgagctatgattgcaccactgtaagccagcctgagcaaccaagcgagtccctgtctcaataaaataaattttaaaaagaataaaaagtaacatggaatatcacccatccctgttctttgaagcctttcccagccccattccacaaccagagagcctccctggccctctctcacgccatgtgctggactttttctctctctggcttgcttgttcctggcccctggaatttctgttcttgccttaaatgcagcaagtgaggaggtatttgccagccagaccccaaaggctgacactgaaatgccaaatggttctccaagatgtgtcatccaaccaagacagcttctcctgcacagacccctgccctctactcggggtgggcagccttctctcctcatggataaatatgacgtgttcatgggtttgccccaatggactgtgagctccccaagggtagaggcagtgccacattcatccctggatccactgcctgggtagtggcacaaagagggatccagtaattgctgaatgaatgaatgaatgacccagacagaactttgtcaaaccagtgctgtcaaaagcctcttggatgtactccattgacattaggtgggtctaatactctcaggttatattggcctgcaacatttatttcacatctcgaaggcatttttcaaaaagcattgcttctgttttatttatttatttttagagacaaggtcttgctctgttgcccaggctggaatgcagtggtgtgatcttggctcactgtagcctcaaactcccaggctcaagcgatcctccctcctcagcctcctgagtagctgggactacaaacacgcaccaccatgcccagctaatttttgatatttttgtagagatggggtttcactatgttgcccaagctggtctcgaacccctgggctgaagtgatccacccgcctcaacctcccatagtgctgggattccaggtgtgagccaccacgccctgcctgcttctgttttcttttatttctcctttccccctttggcctggttggagcctcaaggggaaaatccatgctgggaaacaaaaacaataatgcccgtgaacatgaagtggatgtgcagacagctggaatgataaatgcagggcatacacacacacacacacacacacgcacatacacacacacagagagagagagaaaagaataaacaggcagacgggcagggcaagtgggtgcgggggcgtcagtgtcatctcatggttccgtagagtcgagattatctcagcttcaaatccaaggcccctgcagcaagcccgccctcaagattctcttttgaagtcacagtttgccaaacatctctgggtttcctcctttaaaactaatcttcttaaccatttcagtaaaaatcttttcaaaatgccccacattttatggctttgagactcagtgtctttagtatgttacggtatctataaagaaagcagcatttaggccaagtgcggtggctcacacctgtagtcccagcactttgggagactgagacaggaggatcacttgaacccaggtgttcgagaccagcctggccaacataatgagacctggtctctacaaaagattttttaaattagctaggtgtgatgggttgtgcctttagttccagcactttaggaggtaaagctgggaggatcacaaggtcaggtgttcaagaccagcctgagcaacatagagagaccccccccgcctcccctacatctctacccaaaatttaaaaagttagctgggcgaagttgcatgggcgcatagtcccagttactcaggaggctgaggcaagaggatcgcttgagcccaggaggtagaagctgcagtgagccatgattgtgccactgcactccagcctgagtgacagagcaagacctcatctctaataaataaataaattgaaataaaataaaaataatgttttaaaaagaacacagcatgtagtagtttgggaatcagacaaatttagggtcagtttgaggatctacccaagctaaacagtaggacctctgtttcctttgtttttctttaatttgttttcccaattttttgttttggaaactttcaaatcaatagaatagttataagaaaagttcaacgaatagccagagatcagggactggtaaacttcagcccacatcctggttttgtatgagctaagaatggtttttaattttttcaaatggttggaaaaaaatttttaaagaatttttcataacacacgaaaattacatgaaattcaaatatcagtgtccatgacgttaactctcttgtttaagtattgtttgtggctgcttttgctttgcaacagtgaagttcaatagttgccgtagagatcctggctctcaaagcccaaagtacttaacatttggccctttacagaaaaagattggagactcctgaccccaatttaccaattgctaatattctgcctcctttgttttctctctctcttgctggaatgtttgtgttcatccttaaatacttcagtgcctatttcagtttcttatactgaaagctgggaatgacagctttagtgtgggaagagataagataacataaaatgtttagcacacagtgcttggcctgtagacagaacttaataaacgatccaaaaaaaattcctggcattgagcacagaggtggttgccagaatccctaacctgaaaatgccgagccccactgcttttctgaaacccgggttcccgcagtctggaagccagcttttcctccaaaagggcttctttcctgagaagtagcaaacgcctcggagaaacctcattctttccacagctatgtggcttggctgactcaacttctgcctgcccctgagtcacgagtttttcctctcttatttggaggagcgaggccctccaccctccacccagctgtccccacgcacagccagccccgctgggaagtggatggacagctgggagaccagtgcgtgctgcctccagggcgtttcttggagcgccattcagatccatagttggaaggaaggacagaagaggagactgaggtccaagtgggccctggaccaccagcaggacaaggctaggaggaacatcctccctctagtttcccagtcatgaaaaggcttccttctcccgaggcctcctctgtacggacaaggtgttagatgccaggacactgttataaagagacagccctgccttcccaggggactggctcccttccaagtctcacagccacctccaccccagccagggcctaccctccatgagaagcagctccttgccagggaggtggcggagctggcactgagcagtcatggatcgcagccttgaaggctcagcttgaagtccccctccacccgctggtgacaagcagtgtgtacacaggagatggtgtttcccagcatcccaatggccccactgaccctcctggttattactctgcctgtgggatctcagaccttgtgttttctgctctctgtggtatagaggcctggctgccccttcaggacttgtaaacccaaacgtatattcatctggaggtgcaaaagggggtaaagtgccccaagggggaaaccagagggagtgtggggaccatagtggaggggagaacacaaggcccctctaaagaggacccgcattctcaaatcttctgatttaagagaagctgaagatcctgatttttatgtgaactctccccatatgaaatgttcacagcaatgcattttaaaaatgtttaaacactttgaaagcaaacagacattattcgggtcttgtggggttcagggttacttaccaggcggtgacttctgttgaatgctcataaaagctgtccttgctgatgagggcaacggtagtgggtgggcgccatgaagtggtagtggggagggggctccccaaggccacagctggtggccctctcacttgcctgtcccctctccctccccctccgtcaccccctttcccttcccttctcagctgggagaggaccgtctccagcactgggcccacctcacagcctcgcccatagccccctgccaagagagcaggcacctcttctagctccagccccacagccctacagcccatcagccctccccccgctgctcccctctcacctggtcctggcccagcaggcctgccccggcctgagccacccctctcagggtgcccaggtggagttctatttggcaagacaacctgcatctatgtgacaggtagggactgcgttcctcctatgcgctgcccgttctcagcactcggtatgcaggggtgaaccagaagaaagtcctgtctgaacacgagaagaaattactgtctagcccgtggggctcacagcctgggtgggaggcaagccaccagcatgacttgtttatgagcattccacagaagccacagcctggtaggcagccctgaatcccacgagcggcctcaggagaggactctgggttgggagatgctttgcaaaattacaaacacgggtgactgtggagggagatggggtggagacagggaaccgctttgggtggccagggcagcctccctgaggaggtgacagtttgaggtctgatggaggtagaagcaaaggcctgaggctttaaggaacaggaagaagcccatttgagaggacctgtggggaggaggccagggagggccaggaaggcctccgggcactgaggcctgggaatttccttctgagccgcacaggaggctcaggtgcggttgagtcaggggtgacataacttgctgctagtgttggacctgggtgacgggcaccagggtcccctggactattctctttccttcagtttgaaattttccactataaaaagcttaaaataggccaggtgcggtggctcactactgaaatcccagcactttaggaggtcaaggcgagaggatggcttgagctaaggggttcgagaccagcctgggcaacatagtgagacctccgtctgtacaaaaatacaaaaactagccggtcctggtgggctaattctcctggggtcaggatgatttctgtgcaggctgcagtgagccgtgaccgcgccattgcactccagcctgggcgacagagggagacaccgtctcaaaaaaaaaaaaaggttataaagtgctgctgcattttcatattacgattattgaccgctgagggtgactgtgctgtgaggcccgccggaggcaccagaaggcacaagcctcccactgcccctttccccgccaagtcccgcaggtctcgcagtcgcgggcgcccccaccccacccctgcccaaggccagggtcgcagtcccaccgggtgacggcagtcgcgctccgcgtggggcagcggcgagcggaaagggaagccgggcggggccagggggtcaaacacgggcgacagtcccgcccagccccggacctgcagcgcgcacaagctcgggcgccctccgagcgccgcgcccaagccccgcccctcccgcttcccgggctccgattggccgagccaccgcgggggcgtgtccggcggagctggccgggacccgggcggagcgggcggggacccgggctactgcggtgtggactcgagggctgggcgcggggccggcgcagaaggtgagtccccccaccgtcccccggccgggctgcgggtcgcggggcaggcgcatgaggcgagtctcccatcaccacccccggacaagcgagctctctcccgccgcgcggtcttggcggctcctgggccggcggggcgcagtgccgctgactccagcccaagaagaggcctgggaagggcgctcctgggcggcttgcggggtgaacctgcagggagcctggggagagcggtcaggggtcagagcgtccgaggcggaatccccggggaaacgcgcagatgtaagctggtggaggtaagggggtcgcgggccacccgggactgcaggggtctcagcgcacccggtcgctggtggtgtttccgggatcctggcctcgtgtggccgccgggacctctcttctcagccccagtctgcagtctggaggcctggatgggaccactgtccccctgggcaggggcgcggcggggggcgctggggtcccagttcctctggagcagttgagtttgtgattcttggtgggagctgccaagggaaacagggtcgggcactgctcccatctcagagaggaaactattgagcaggcccgcagagagaggcggcctggaatctccctcctttctcgtttccccaacacctggcgggccgtgtagggcagaggtgtggtcagcctctttgcaggtgggaaagcagagaggttccgagccacgctgaaacttgatctctgcagcccaaggggagcactcctttggaatttgaacacctctggtatctcctggccagagagggtcagaggccaaggaggtggggaggtagtcccctaatgcgctgggatcgtccctctgcacagcgtcgttcccactggagtctgttgtgagctgagatgactctctgacttcggcctgcgtccctgcacacgtcagccctccgggctgccaaaacacaggccaggcagccctgggtgaactaggggacctgcccaacccagcccaccccgaggaaggaagggggattggccagtgtggcctggagggtgggacagcccagccaagctgacggacctgctcgggatggggtgggcatcaggcatttggagcgcaggcaacacccgctggactctgacttctggagttctgatttggtctctggttgagtgcagctttccacagctcatggttattttggagccgagcttcctgatcactcagcagggaccttgggcagtgactttgatgtggtggaagtaccttccccaagggggcttttgtgaggattaagtgaaataatgaacgtaatatgcttaactttgtgcctggtgagctctaagtgctcagtcggcggcacttccagttttgttttgctttgtttttcattaccggtctcttcccggaggagggccttccaggaatcacagggctggacagagcccaggggcggcccctctggagggagaggaggcttggcgcctgatgctgcagtctcaatgcacatggagaaaacctcacatcctcacgctggcctgggagcctgcaggatgtctcctgccggcactgcaacctcatctgtcctccttgccccatcgctccttcctccgcagcctgacttcacccattccaccttgagctgctccccaggaccggagctctgcccctagatctttgcacagctgacttcaggctggagtgagttcacttcctcccaaggccttccttcctcgacctccaccgtcctcccaggccctgccctgctgggcgcaccagtctttttcttcacagtgtttagcactggctctcagaaaagaccctgtgaatgtacttctagtctcactggcaagaagtgtgcattcctgaagggcctggtctccagctcccggctgtaacctcgcacagtgtctggcacacagtgggactcataaatatttggaaaatgaaatcaggcaggcatggaagcagggtgggtctgcgtgcggcccaggtccctgcagggaaggaggagccccgatctggaagtcaagggaaagtccaaagggctgagctgcccccagaactctgattcccttggtgaccctggccctgcacgtccctgagcaggttctccacctgtaacccgaggcagagcagttacagcccccaccccatcccccaccgctgcccagctcctactttccagggctaccatcttggggccccacgcatctctcatttatccaaaatgctgtgtccggagtaggagagaggacaggacgactcccgtcaggacagtaccttgtgtggcctgttcagcgtgccctgcagtgtgtgcattatacattttacaatgtggcatggtgtagatcaggggttggctaaccttttctctcaagagctggtagcaaatagtttaggttttgccagccatacagcctctgtcccacatggctgtgtttgaataaaactggatttagaaaagctggcagtggcccagatttggtgtagctctccagcccctgctgttgatcacgtatcacacctgggctgccacatacagaacctggcttcatggcttctgcagccacacgggggctctcaggatgtggctcccaagccgcagtgctcacatgagcacctccagcccctgtgcaggcagcaggattgctgagcctgagagcccccacccctctgaaccctcaaagaaagatgcaggtctgttcgttgcctggtctcccaggcttactgagcctgcgctggggtcacccctctaccagcagccctggggccacactggggccaatacaggcactcagggcccagaggctgccaggaagctctgtcaccaacatcttcccgaggcaggccggccccaaatgagtaaggacagggctcagcttttttctcccctgtgctaagcaagggaggttcacttccctagtgagaacaattaaaaaaaaaaaaaggattcccagctgggctcagtggctcatacctgctatcccagcactttgggaggctgaggagggaggattgcttgaggccaggagttcaagacctatctaagcaacagagtgaaccctcgcctctaaaacaaatttaaaaattagccaggcatgttggtgcatgcctgtggtcccagctactcaggaggctgaggcgggaggctttcttgagccctggagttcgaggctgcagttagccctgattgtgccactgtacttcagcctgggcaacaaagcaagacaatgtctcagaaaaaaaaaaaaaagaaagaaagaaaaaagcattccccatctaactcagggctgctgtatttgccaagaaaaacctacaggcaaggtcaaaccaggatgtgaagttgtggtcatgtagagaaggtgagcatgccggggcagctcccaggaggatgttgtctgccccgcccctcgcccaacctgggaccctctgcaggttcacaaaggagggcacatgtgagcccctggcttccccagtcagtgtgtggggtcagctctcagcccagcccctttcatcgccaccagatgcccctcctcgcccttcctggtccacattttaccatcagcagctggacactagccctaagagcctagagggggtctgtgagtcatgggtgggggcagagcagcaaaggggtcccatgtggagtgttctgcaccccctccaagggctgcagagacagcgtcatggactctgccctctgctggacgggtccagggtggattgggcacccctgcctgcagctctcttctgcctggtgctgctccttcccttcctccatgccatccacttggctggcccagtctccagagctcaacaagcccccagggttgcgggagggctacctgctctctgggcacaaagcccacctgcctcagctactgaatgtggaggctttggtctgcagtctcaggtttgggttttcatcccgtttcaccagtggcctgacttctcagcacacagctgggctgggggcacacgtggccttgcttcttcggggctcctgacatcccctgcaggtgcccaggcctggatgccatgtggtcaccctatcaggcccagccaggcgtcccatcatgagacatgctcagcggcccccagcccatggagcccaggacccaatccagacactggcctgtaattcttttccttttgaagaccttaaattagaagaagcaacacgtgttcccatttcttgaaattggcagatattcggatttcatcgtgtttgctgctgcctttttttaaaaaaacttttttaaaaatgaaaccttatagacgaaagtggaatccaatctgagccctccattcctggtcacatctatgtcctctccccaggctacttactcctgactttctccttcctatcttttatttttaccattctaaccactttcaagtgtacagttcagtagtgttaagtatattcccattgttgtgcaacagatctccaaaactttttttttctgagacggaactcactgtgatgcccaggctggagtgcagtggtgtgatcttggctcactgcaatctctacttcctaggttcaagtgattctcctgcctcagcctcctcagtagcagggattgtaggtacataccaccatccctggctaatttttgtatttttagtagagacagggtttcaccatattggccaggctggtctcgaactcctgacctcaagtgatctgcccgccttggcctcccaaaatgctgggattacaggcatgagccaccacacctggcctctaaaactttttaatcgtttaaaactgaaactccatacccagacaacctccgcattccccttctggcagcccctggcaaccaccattctattttctgtctctatgaatttgatcagtatgtatatctcatataagttattacagtatttgtccttttgtgatgggcctgctttacttagcatgatgtcctcagggctcattcgtgttgtagtgtgcgtcagaattaccttccttttcgaggctgaatagtattccatggtatgtatgttccacattttgttcatccattctcccattgacagacgtttgagttgcttccacctcttggctattgtgaatgatgctgatatgaacatgggaaagcagatatttattttagtccctgctttcagtctggatatatatccagaagtggcattgctggatcatatggtagttctgtttttaacctttttttttttttgagacggagtctcactctgtcgcccaggctggagcacagtggcgcgatctcggctcactgcaagctccgcctgctgggttcacgccattctcctgcctcagcctcccgagtagctgggactacaggcgctcgccaccacaccaggctaattttttgtattttaagagacagagtttcaccgtgttggccaggatggtctagatctcctgacctcatgatcccccctcctcggcctcccaaagtgctgggattacaggcgtgagtatttttaactttttaaggaacttccatgctgttttccttaggggctgcaccagttcctattctcatcagcagtgcacagtttccagtttctccacaccctcaccaacacttgttatttattttttgttttgtttttttcccctcctttttttttttttgagatggaatctcactctgtcacacaggctggagtgcaatggcgccatcttggctcactgcaacctctgcttcctgggttcaagcgattctcctgcctccgcctcccgagtagctggaattacaggtgtgaggcactgtgtccggccttcctcctacctatttttattcatagatatagttcttgaacactttcagaatgttatgtaattcctgcataagtggtgtcactttacatacaacattctacaggctgtgtttttccactccacgtttgttgtttgccgtcagaccacattgatctgtatctctcattgcgtgagtagccccgggtttttatccttttccctgctggtaggcattttggttgtctctgctgggcagtcattgctctttgtggaatgcagttctggttttgtcagattgtccctcagccaggtactcggtgatcagtcatggtgggacaggtcagttctgtcactggtaatcccctaggtttgcagtatacagccaagatcagcaagctaaaaatagcagttcttacgtaaggtagtgtgggcagcccttctcaggacacttgtgatctgcaggggcaagtggaacgggactcgagggcccagcatcttctgttctgcaatgcatccaccctcacactggggccccactctggctttctactggtggccaggctcagaactgcagctcagtgacccagaaacactatgggtgtgatcagctcagccccaggcgtgccgtgtgtaccggaatgcatgtgtgcacgtggtggtggtggggccagctctcacctcttcctctgtagaggtaagagctgagtcatgcatggtgggccttgggacctgcttggaaccgtgccaagctacttatgaagcatctagtatgtgcttggcatggctccaagaattgtggacacaatgaacaagaagaagctcctgttctcatggagctaagaactgagcagggaagcagaaaacacacaagcaatgaatagacaagcaaacagcaggtcctgttaaatcccacaaagaaaaacgattgaatcccagagaagtggccagcagaccttttctacaaagggccaggtggtgaatattttaggctttgtcaccatgtagtccctgtcaccaacactcaactctcccattgcagtgtggaagccaccagagacaataataaatgaacgaatgtggctgtgtcccaataaatctttaacaaaagcaggctgagggccggatttgactctcagaccttggattaccaatgcttgtcctgggtgtgggaagaggctgcctgagctggggttgtcagggagaaccctttcaaaaaggaactgagaacccgttgcaggaaggagctgaccctgggacagcctgtctcaggtaggacacaatggcaccttgccaccgatatggtggcggagttatgtgctgagaaatgggcaggctagatttgagaggtaaagatgatgagatttactcatggcttgaatattggaggtacaggaagggggagattcaaggatgtgtcctaggtctggggtttgaactcctggatgaatggtggtgtcactgaaggagaggaagaggtgcaggtctgcggaggtttgttgttggatgtgttgagtttgaggagcttattagacaagcaggtgaacatctatgctgacagccctcctagagcttggagaggccaagactggaggcttggaatggggaatctatggcatttatggggtcttcaaggtcgtgagtctggtgggctggtgtgtgtgtggaccaagcagggggcgcccggcatgagctctgagttagtgcttagtgcttagggcaccaacagaggggcctgtgtggcctcacactccactcgggacggcagcatagtgcgagctccagggcccctgcctcctagcatcgcctcagttcccctcctgtaaagtggggattctgccttctggggttgggtgggaactaaatgagatagtcacgcttggctgacaggaagcactcggcgcctgtgcttgtgatggtggtggtgactgctgcacttcctgggtggttgcgtgggttgcagggcctgtgacagcttggtttggtggatggcagagtcagggttgggttgggggtagagacacccaggtctcctggcacagaccgttctgatgtcccgttgaggcctgttccgccctgtttttcaaggctccccagcggggctgaacctctgccctctgctgcccacagtagtagccggctcagtagcactttttttttttaagagatagaatccactcagtcacctagctagagtgtagtggcatgatcatagctcactgtagcctcaaactcctgggctcgagcctcctcttgcctcagccttccaaaacgctggaaccacaggcatgaaccgctgcacctggcctaagtagcacactttatcactgccttcccatccctgtctggcctccacatcccctttactgggaaatcccccttccctccccgtagttccctgtactcccgtctaagggtcagcttccgaggtgatgcttctcagtgctgggcaggcctgcgggttactgtgcgtagtcagtgggctgcctggcatggtgggttagtcagttgggggtgggcagcgtggttctgacacccccatgcctgagcctggacatactccttgtctgtctcctcctgcagccgccagctggagacgatggtggaccacttggccaacacggagatcaacagccagcgcatcgcggcagtggagagctgcttcggggcctcggggcagccgctggcgctgccaggccgagtgctgctgggcgagggcgtgctgaccaaagagtgccgcaagaaggccaagccgcgcatcttcttcctctttaacgacatcctggtgtatggcagcatcgtgctcaacaagcgcaagtaccgcagccagcacatcatccccctggaggaggtcacactggagctgttgccggagacgctgcaggccaagaaccgctggatgatcaagacggccaagaagtcctttgtggtgtcggccgcctccgctacggagcgccaggaatggattagccacatcgaggagtgcgtgcggcggcaactgagggccacgggccgcccgcccagcacggagcacgcggcaccctggatccccgacaaggccacggacatctgcatgcgctgcacgcagacgcgcttctctgccctcacgaggcgccaccactgccgcaagtgcggcttcgtggtctgcgctgagtgctcgcgccagcgcttcctgctcccgcgcctgtcccccaagcccgtgcgcgtctgcagcctctgctaccgcgaactggccgcccagcagcggcaggaggaggcggaggagcagggcgcggggtccccagggcagccagcccacctggcccggcccatctgcggagcgtccagtggagatgacgatgactccgacgaggacaaggagggcagcagggacggcgactggcccagcagcgtggagttctacgcctcgggggtggcctggtctgccttccacagctgacccccggcctgcagaacatctgtccccaagccagctccactgcccaggcccccaagagggcagctccagaagctgcccagggctccgggaccccatcccatggtggcaggtgcagcggtggggagtggctctttctggactcccagtgcctttttgctggacactgtgtccttatggcttcactgcaggtaatgcctttcccttcaggaagccccagaacacccacaggtcttggtaacaaacgccaccttacactctgcaggctgcagcggcagctccagatggcctcctgagctggacgaccccaggtctccagacatctagggaccagagcaggtttgggaacacagagggaagacaggatgggagtgtagccacagaacccacctgcaccctgacaggcacaccccactgaagagcctgagtcccaggaggcctcctggaagcccaggactgcccacccaccacgctggtgcccaccgcctggccagccaagccctgccgatcagacatgtgggctccccgaagcccagccagagactgccgtgctgtgggtgccaccaggcccagggactgcagcctgagctccccgaggcccagggcagccgggtgaggactctgtcctgtgtcacctctctccaggtgtccagctgtctcatgcctttttgtcctgtcctcagctctccgtgtggtcagcgaaaccattgttttctgttaggactcagttgcaagaacagaaaccctgcccccacttaataataaaaaagaaagtttattgatgggtggttgcaaaacaaacccaggagtgtccttgcttcagacatggctctgtccatggttgaaaatgtgctaggtggcaaaaatctaccactgtcccccacactgggagttcttgtgtatgctggctgcctgaaggagacagacgctcatgctgtgccttggctgggctcccccaggacacaggtctgtccgggtgccatgaccgtggcctgatgcctgctgccctattcactttggtgtgggcgatctcagtggatggaactgaggaaacaaatagccatttgtgtggctctgccgggcctcccaggctgagagcttccccgtgcagtcctgcctggccctggggctggtgctatggagagggaaactgggccccaggtacaccagcctttctcagagtgagtgtgcattgggcctggggctcgaggtcagcctcccaacgcctggccccatgctggccatggaactggggatcctttaacagtgtcccacgagtgcttctgcactagtctttcccagcgcctcagccttggcaggactggggcatggactggggttgctgtcagctagaagtggtgaccgtggggctgggagttccctgcccacgcagtacagcatctgaaaccccactgacagggcctctccctggcctagcaccatcctcctggggccagttctcagaggttcacgtgcagacagaaccctggagggtgcagttcgagtgcagattctgattcggcaggtcgaagcccagctcccagggcctgccgctaccaccacccacagaccacccttgaggtgacaaggcctgctggtggcctgtgggcaccctgtgagggaggcgggagggtcagtatttttgtttgtttgtttttgagacagagtctcactctgttgcccaggctggagtgcagtaatgcgatcttggctcactgcaaccttcacctcccgagttcaagcaattctcctgcctcacccctgccaagtagctgggattacaggtgcccgccaccacacctggctaatttttgtatttttagtagagacgagttttcaccatgttggccaggctggtctggaactcctgacctcacgtgatccgcctgccttggcctcccaaagtgctgggattacaagcgtgagccaccacacccggccaaggggtcagtatcaaagcgccttcgacctgccatgcttggcagaatgaccagtgtgggaggcccactggccttccaggaaggacctatttgtttacagtccctttctctcccttggcctccctgaaccacacaaactggttcaggctggttctgcctgggcagagggcacagggtgagacaggtcacggagctgggggtgacttcctggacagatctagtgccctctccaaaacccagcccgggcagccctgtccctgcaccctgggactgaagccagggcagggtgtgttggctgccaccgctggcctcttctcacagcacactcccctgcctgaaaaccctcagagcctgaaaggcagcgttcactaagataggagaggggaccacgtgcagctgagcccggccaccaccagcctcctctacagcttcctgccaagggggtccatgcacaggaccccaggctgactgagtgcagtgtcgtcctctccaggtcatggcaggcagcgccctggggtctggctgagtaggtgattctcatcccttagcccaggactcaggtctgtgtccctctcccctgcagggctggaacagaactgctgctgccccaagtcccaaggtgttagggcctgtaagggcccacggcttggggtggcccaggaccttcgcagagccttcacacctgcggtcttgctcccgcaccagctgggccatgccagctgctggggacaccgctgggagtgagacaaacaaggcccgcacagcatggtgggggagacacaggtgcagaagccagggtggagggtgctatgatggggacgggctgagaatgagtgagccacgcctgcctggtggggagaggacattccagcagagggaacagtcagtacaaaggcaggaaagggacccctgtgacctgagctgcgtggctggagctgggcccccagaggcacggggcagccacctcgggtgccccagagctgtcggagccttctgcacgcagcaaggctgatctcggcttttgagaatttgtcctgactgctgtgcatgggtggctggtgggagagggggtctggcagccatggaggccggcagctgtccgcttccctgggatccccaagggcggacctgcgcttcactgaggccacatctgcctccgattttggctctggctgtggactggaagccttagctgccctccttcccatcctcagctccttccaaggggcaggccccctcccctgttctgctgagaagttttttgtttgtttgtttgtttttttgaaacagagtcttgctctgtcgcccaggctggagtacagtggcacaatcacggctcactgcagcctcgacctcctaggctcaagccatcctcccacctcagcctcccaagtagctgggaccacaggcacacccaatggcacccagctaatttcttatttatttatttatttatttattgagacaggatttccctatgttgcccaggctggtctcgaacttctgggctcaagcaatcctcccacttcagcctcccaaagtgctgggattataggtgggagccaccacacacccagcctatgctgagacatccaacaggcactgagtgtcagcttccaggctgacagccgagggggcgccaggaagcagaatgacccccaggactgcatggtgtttggggccagtgtgagtttgaatgaatcggggtccctggccactgaggcacagaggggagtatgctgggagagagcagagccacccaaaatggaagatgtgggcctggccagtgggcccgggaagggaaggtgctgccctggaggccctgtctccaactcctatcaggtttattttccaccagagatggcctcctgggccaggctcgggtcgacaggtgaagctaggccagctgcccaggcagtccccggagagggccctgcctcaaggagcaagcacggaaggggaaggccagcctgtagagcttgcagccgtctctcctgcttcgccacagcaccgctgccagtccccttcttgggtggggaagctccttggaggctctggaagttgtcttcagtcccagccatgcagctgagctttgctcattgcctgcactccgcccccacgcctgggaaggtcaggaggcctcgggccgaggcctctgctgtttgcagatgctccctttccccagagctgagcctgaggtctggcaggagcacggggctgctgggccagggtccagcctcacgctcctgcctggggctttgcttgcaaggcctggcaaggacacgggaaccaactgtcctgccagccgagtgctgctgtccacctctcaaatcttcctcccagctgtgcctggactccatgtccctgccagaagccggtccttcgcacaggcagcatgggattcctgggaggcgcctgcctcgtcccctgcctcttcctaggaggtgcagaggggtgaggagagggtccgagaacaggcccatgcatttgaggggcatcagaaccccaccactccacccacaggggcaggccagaaccgctcctgcaggaatcagcccagagcagtgcagctcaagatggcaagtacagtcacagctgtgaccccagggctctttgggattgatgacagcccctttatttattattattttttttatttttttgagacagaatcttgctcttgtcgcctaggctggagtgcagtggtgcgatcttggctcactgcaatctctgcctcccgggttctaagcgattcttctgcctcagactgccgagtagctgggattacaggtgcgtgccactacgcccggctaatttttgtatttttagtagaggtggggtttcaccatgttggccaggctggtttcgaactcctgacctcaggtgatccacccaactcagcctcccaaagtgctgagatggcaggcgtgaaccaccgcacccagccagctctccctttagagctctgcaggatgcagtgttcccacgggacccagaggctgcagacactaaggagactttcacaaaggtcaagtagcccctacctgtgggctttggtggttgggatttttccatgccaagttttcttaaagatgggcccgccatcatgtatgctggtaacattggggtgttgcctgccagaggccagggagccaggcggggggttcacaggtccccaagaattttgtccctccttgatgatgatggggtgcaggtgctgatggtggcagcgactgccacttactgaggcccacccatgcgctggttccaaggaggcagagacaggtcacgtgaggccatcctaaggctaaaggagatatgtcatgagccctgagagagggatagacaaagccagagaaaggaactcccaaaacagctgggtgggcttcctggaggaggcggtgtttggttgagcctcagaggatggtaggactttatcagaggattgtagtctccacgaggactgggactctgggcctttttggtaactgtcttttcctgtccttggcactaaacatatgttgaatgaataaatgagtcaggtagaaaatggggctgggggcatcggggtagagaggatgataatgaaagcaactgagcttcaccctggagcctccaggccaggctgtggatgggaactggtgttcctggtgtatttctacaggagcagggccagcaggagggctcagcctggcccagggtttagggaacagtccccctccaagacgctaaatgtgagtggccttctcaggtggggacaggaatgcccaccccaccccacccaagtagcgctttctggagctgggtctgacttgatcacaggccgggctccaggcttccatggggctgtcgtccaggctggcaccagagggtttccgctggcctggccacttccctgcccagcctgttctttgaacaaggccagaaagaggcctaggagaaggcaaagccgctcctgggctcagcccctgggatggggcctggaggtgactcgaaggctgacccagttcccagccaggatccgctgccacccgggccacacgcgcaaaccaaggcaaccacttccgctggggccgtctctgaggagatgtgcaggaagtgaacttcctggggctgagggcaggggagaggccgcctcctaacacctcatgcccgcaggcccagggctgcccctcagcccttgctggctgggagaaggagggtcctctgcctctgtctgcatctaggctcttcacctgggaggcgcccacaccgtccatgcccgtgctctgcctctgccctcagcagacttgatggaaccggtgcccaggagcaaaacctcaggcaacgcaggggcccagagtgggcagagggaggggtctgcctcgacggcccagcagatctgggctccggcctgtcctgggctgcttgctgaccccatacccaccatttccccagtctgcctgtgaactttggcccggcccttcctgtgaacctggcacagaagccacctcctctctgaagccttcctggcttgccccaggtagtgtggatcacccatctgtgcccccagaggcccggtggcccctgctccagctctcccacctccactctctacaaggagcctcaggcagcctgtgccccccaaacctggccttggcatctgagctccttgaaagcacaggtgtttctcatttgtttttggcctccatggcccccaacccatggtcctgcaccgctgggcatcgcacaggtgcttcccttgcaaggaggaattgtcaacttccctagctcctggaggacactgggaagatgtcacagggatctcaaagcccatgtgtcccaaaatgacagcattggctttgcccaacccgcttgtcctgcctctgccaacacctacacctgggcaacccagccaaaccctaaggtgtctctcgaccctttcttgctccttccacctcctcccctacgccttccagggccccaggcccagaatggaggcatctgtggtgcattcaggcacctgaaggagtagccctgcaggagtagctcaggcgaggccacagaggcaggtgtgggccagtgtagaagggaggacagggagtgaccccagggagactccagcctcctctccatcatcccctttggcgtcagggctggaaactgggcccagagggtgggcgcaccctgcacttgtgtgtcagggtcgggccaggagcagagctgcggccagctgtgtggcctctggcctcccaagccccctctcctgctggcttccatcaccaccaccaagtccagctccgaatggaatgttccaatgctcagagcagagcagcaggcagggaaggaatggggatgtgggcaggcagagccagacatttctgggcaacaacaaggggaaatttcaatccttggagcatcagctcagggttcctgccagacattctgaccctgaaacacaggctttctggagaagagggcctgcccactgtggtcccaggctgggaggcagagagcctagggcctggggctggtcatctgggctgcccagaagtgcccgaggcagtccctgtctcccgcagcagcacagctacgcccatcatgcttcctctagctgcccacggcagcacctgggctatggggacctgggctccgggattctggagcagcacactgggacacttcgtacagtttgcaaattactaatacccttaaaataccaaaatgcctttggatttcagcagccaccagacctcctgggggcccccaccatgaagcagaggcctttgaacctcgcctgccccagccataaccacttgctggcacaacccaatccctgagggtttctttcccccacgccagagctggagttggtacagagagagcaagagtcaaagcacaactgctcagcaagttttgggggtcgggggcgggaggggggactgggcttctaacaagaccgtttcgtgggggccgggggtgctggtcatacaccccgtggcaggccacaggctccccaagccccctctattctgcgttcatgctgtttctgcaccttgaaacccggcacattcatagctccatgcccacgtgtggctgggagtgagctcccagggtggcagctgccagtggcacagcacttctccacccggaacctcctcttcctcaccttctgctgcacagcctgatacggctgaccccacccatatcctggctctagaaatgggcacaggacaggggtctaagcagccagtgcacccatcccccgactatagtctttgagggtcaaaagcctctactcccactgtgcagagggaggggtggtccctggagcacaccagcaggtgagtcacggtgcagggctctcaggagagtccagggaaagggatggaggtgaggatcttggggtctagattcattcccagaatgagcctgtccgtagttggggagcactgcacggttttaaatcagttacagagaaaaccacccagcaatgagcaactccaagatgtgaaggggagcattcagtagcacaatggacacagtgactggcgcctttgtgcaaacccaaaacaatggactctcactcagcaggtctccccctcacggctgatgaacatgagtcaaagccggaggaggcaacagaattcagagacaaacctcaacttagaggacactgatgcggaagaacccagcggcttccagggcttactctgttaaagcgcccgtgtccctactactaggtccaaggtatttctgcatattggtgtcctctccaaaggtcaaggagcaagcggttagggaaatcagtaagtcctcaaaggagtactgggagaaattagcatgggggccggacacacagttcagagagtggggacagccagccatgtggcgatgggtcatccctgccttgggacttttgttttcttttctttttgttttgttttgagacagggtctcgctctgtcacccaggctggagtgtagtggtatgatcacagctcactgcagcctcgacctcctgggctcaagcgatcctcccaagtagctgggactacaggtgtgcaccaccatgcctggctaactttttaatttttggaaagcttgggtcttgctcttgcccaggctggcttcaagccatcctcccacctcagcttcccaaaatgttggcagtacagccttttctttcttttttaaatcaaggtaaaacctacacccagtaaagtgcacagatcttaagtgtgcacctcagtgagattttgcacaaacacgtaagtgtgtaaggcaccatccagatctccagcagtcccagaagtctccctctagcccgtccccatggtacctgcctccaaaggttacttggtgttctgatttctatcacaagtttttcctggtgttttgttttgttttgttttattttgtttagagacaaggtcttgtcacccaggctggagtgcagtggtgcagtctcggctcattgtagcctcccaggctcaagcgatcctccctactcctcctgagtagctgggactacaggcatgtgctaccatgcctggctaactttttttctaaagatgagatttcagtttgttgtccaggctggtctcaaacttctggcctcaagtgatccttctgccttggcctcccaaagtgctgggattacagatgtgcaccaccatgcctggtcctgttttttttgttgttgttgttttttgttttgtttgtttttttttttttgagatgaagtttcactctcgttgccaaggctggagtgcaatggcgctatcttagctcatcacaacctccgcctcccaagttcaagtgattctcctgcctcagcctcctgagtccacacctggctaattttgtatttttagtagagactggatttctccatgttggtcaggctggtcttgaactcccgacctcaggtgctccacctgcctcagcctcccaaagttctgggattacaggcatgagccaccgcgcccggcaacctggccctgtttttaaaaaacgtcatataaatagaatcacactgtgtgcattgtgctgacttctttttttttgtgtttttttttttttagatggagttttacttttgttgctcaggctggagtgcagtggcacgatctcggctcactgcaacctctgcctcccgggttcaagcaattctcctgccttagcctcccgagtagctgggactacaggcatgtgccaccacacctggctaatttttgtatttttagtagagacggggttttaccgtgttgtccaggctggtctcaaactcctgacctcatgtgatccacctgcctcagcctcccaaaatgctgggagtacaggcgtgagccaccttgcccagctatgctgacttcttttgcttaaacttatgcctgtgagattcctccatattgttgtgggcatctggcatttgttcttttgcatcgtggtaaagtatcctgttttatgaaccttccacagtttcttacccacgcactgttgatggacatccaggtggtttccagtttggggttgttatgaataaagctgctacaggcatttctgtagatgtcttttggtggacagaaacactaggtacataactaggagtggaactggcccaccgggtatatgcatatctgattgagtagaggccgccagttttctgtagtagttacatgaatctgcactccactggtgtgtatgagggttccagttgctccacgccctcaccagcacttggtgttttcagtcctttcactgtgatcattctggtgggttacttggaatacaggtctcagacactgtcctggaatcggagctcgcctcaccagtttcatggggtcggtctggggacgggaggggcagctgttcctccagcattcaggcagagcgggtgcctgagactgacatcgtgtgggtgttaggcccagttccaaaccaaagaggcagtcagcatatttatggcatgcacaggttggcattggtgcaaaaaatgaaagaggagaaaactgcccgccagcttttaaatattttatttattcattcagcaaatatttgagtacctacaagcactggggctacaatggtaaataagacaaaaatctctcccctctgggagtccactctagtgaagggagacagacagtaactacaactgaaagtgtgttagagtggccgggcacggtggctcaggcctgtaatcccagcactttggaggccgaggtgggtggatcacgaggtcaggagttcgagaccagcctgaccaacatggtgaaaccctgtctctactaaaaatacaaaaattagttgggtgtggtggtgcatgtctgtaataccagctactcgggaggctgaggcaggagaattgcttgaacctgggaggcggaggttgcattgagccaagatcgcaccactgcactccagcctgggcgataaagcgagattccatcacaaaaaaaaaaaaaaaaaatgtgttagagtctctcatatctgtggcatctgcatcttttccagcactaggaagattcccagcaaagaggggccacactgtttggaaatacacgtgcctgccctttttagttcagctctgctgaggggcttgtgtgtttgctgaaaagattatctcaacattcttccccttgctatagattgtctcatttggggaaaaaaacatataatagagtgtattagcgagtagtaagtgctatgggtaatgacagagaagggaagagacggtgagggctgggtggctacggtttcagatggagcagccagacatggcatcactggaaaggtgaaattgagtcaagacctaaaggaagggaggcagagggctatgcagctacttgggagaagaatattccagacagagggaggagcagctgcaaatgtcctggggtaggaacctcctgagcctggaggggcctagagcagtgaatgaggcggagggtgccaagatgactgcagagaggtgagggggagaggagatggcggagggcctgggatatgccaggagccacagcgtgtggcacacacagtcttacttagctttttttttttttagacaggggcttgctctgtcacccaggctgaagtggagtgcagtggtgccatcatagctcactgtagcctcaacctcctcggctcaagcaatcctcccgcctcagcctctagagtagctgggactacaggtgcaccaccatgcccggctaatttattttttatttttttggagaggtctggctatgttgcacaggtgggtctagaactcccaggctcaagcgatcctcctgccttggcctcccaagtagctgggactacaggtgcaccaccatgcccggctaatttattttttatttttttgtagaggtctagctgtgttgcccaggtgggtctagaactcctgggctcaagcgatccttctgccttggcctcccaaagtgctgggattacagctgtgagccaccatgctgggcaggaactttgttttttaatgacaaggtggagattcctactagatatggagaggctgagtgggccagaggaaaatccaggctgcccaaacacatttgggagtcaccagtgagtaggcaagtcaggggctgggtgagtgtggataggaagagaaggctccaagaaatgagccctgggacaccccagggtctgcaggtcagctatcggaggtcggagcagcagaggagatggagaaggagcagccagtcccgctgcaaggggaaggccaggagagcctggggccagaggcgcagccaggagggagggaccaaggaaggggaggactggaaactgacctcgggcttaggaacgtggaggtcagtggtgcccttgatgaaggatcttggtggggtggtgggagcagatgcctgcgggaaaggaacgagaggacggaagagacagattagcagcggcaagcacagaaactcaccggaggaatgctgatgcaaagggagagagaagtggaaccaaagcgagtttggggttttgaaaaaatagcatttttgagatattgttcacatcccataagatccgccccctctttggagtatccaactcagtggtttttagtagtcacaagattgtgcagccatcaccactatccaatttcagaacagtttcatcaccccacagagaaaccctacacccatgacgagtcactacccgttcctcccacctcccagcccctggcaacggcgaacctactttccacctctgtggatttgccttttctgcacatttcatgtaaatggaattatacaatacatggtcttttgtgactagtttctttcactcggtataatttttttttttttttttgatggagtctcactgtgttacccaggctgcagtacagtggcacgatctcggctgacagcaacctctacctcctgggttcaagtgattcttctgcctcagcctcccgaggagctgggattacaggcatgcgtcaccacgcccagctaatttttgtatttttagcagagacagagtttcaccatgttgcccaggctggtctcgaactcctgacctcaagtgattcacccgcctcggtctcccaaagtgctgggatcacaggcgtaagccccgtgcctggccttagtataatattcaagattcatccatgtttagcgcggatcagtatgcaattcctttttatggctgagtaatagcccatcctatgttctacacattttgttattattcaccagatgatggacatttagttgtaatgctttttggctattgtgagtaatgttgcttgtgaacactggtgtgtgtgtgtttttgtctggacatatgttttccactctcttgggtatatgcctaggggtggaattgctgagtcatgcagtcactctgtttaacgttttgagaagctgtcaaactgttttccaaaacggctacatcattttacattcccaccagcaatgtacaaaggttctgatttcttcccaacctcatcaatacttgttattctctttattttaaccatcctagtagggaaaaagtggtatattgtggttttgacggctgatggtgttgagcctcttctcatgcgcttagtgtccacttttaaattaggacatttgcctctttttttgtagcgatggagtctcattatgttgcccagtctggtcttgaactcctgggctggcagaagcaatcttcctgcttctgccacccaaaatactggtattatagacatgagccaccaagcccagccacgtttgtctttttattgcttagttgcgagcattctttatacattctagatactagtcccttatcagatacatgatttgcagttattttctctcattccatggtttgtttttttcactttcttgatagtgcccaatgcacgtaagttttaaatttttgatgaaatcccattaacctattttttcatttgccacttgtgtgtttatgtcatatctaagaaaccactgcctaatccaaggtcataaagagttattcctatgttttcatctaagggttttatagttttagttgttacatttatgtctgtttagacttaattttttttttctaacaggaaaaaaaggaggattgctggattcaagcaatcctgtcacctcagccacccaagtagctgggactacaggtgcatgccaccacacctggctaatttttctattttttgtagagtcagggtctcactatgttgcccaggctggtcttgtactcttggcctcaagtgatcctcccaactttgggtcccaaaatgctgggattacaggtgtgagccactgcacctggctttgacataatttttttacatggtataaggtaggcagtagacttcattattttgcatgtagtcatgcagtagtcctagcactactggttgaaaagacaattattccccaacaaaattgtcctaatactcattgacattttggttgtttttaatattggagaacaaatgtgcgtgttcatgctaatgaacctgtggaggctgtggagagggggaatcagtgacacagagaggaagaggagaatgactagagtggcatcccctgatgggagagggggtggacctggtgtccagtggaggaggtggccttaaagcaaggtcagttcacagtaacaggaagaaagatggttgcctgagtgcaggtggagatggtgggcattctcttctggaggcttcatttttcctagggaaatgggaagcaaggtcaccactggagagaaagaacaggagaggaagggttgggagcccaagagagaagaggttagagggagaggaaatgaactcagagggggctgccatgttgctggcaattatcccgtattttcctgggataattgccagcaacatggcagccccctctgagcttagtgatgaagaattgaaggtgagagaagcccaggcatggtggctcacacatgtaatctcagcactttgggaggccgaggtgggtagatcatctgagatgaggagttcaagaccagcctggcaaacgtggtgaaaccctgtctctaccaaaaatacaaaaattagttgggcgtggtggcgggcacctgtaatcccagctagtagggaagctgaggcaggagaaccgcttgaactcaggaggcagaggttgcaatgagccgagatcttgccactgcactccagcctgggcaacagagcgagactctgtttaaaaaaaaaaaaaaaggccaggcacagtggctcatgcctgtaatctcaggactttgggaggcccgaggcggggggatcacatgaggtcaggagttcaagaccagcctggccaacatggtgaaaccccatctctactaaaaatacaaaaataaaaattaaaaaattagctgggcgtggtggcagatgcctgtaatcccagatacttgggaggctaaggcaggagaatcgcttgaacctgggaggtggaggttgcagtgagctgagatcactccactgaaatccagcctgggtgacagacgagactccatctcaaaaaaaaaaaaaagtgagagcagtcaatgtggtcaggtgtttttcttcagccatatctgatgaggcagttggagggagaggggataggaacttggggatgccatcatccaaggcctccacagcagggctgcctgttcctggggcaggacaaggctggtgcccagtggctgcagtaagtgaccctctcactggcgatgcttggagtcactcaggtaggtggtctcacccacacaccaggtctatttgacatctcaagggagggggaaatgcccctgccttaggtctggttagagagcacagattagggaagccaccagtaagccctcaactctcccaactcccaacctgtcagcttgggctgccatgacaaaatgtcattgattgggcagcttaaatttattttctcacagttcaggaggctagaagtccaagatctgggagccagcatggttgggttctggggagggctctcttcctggcttacagacggccaccttcttgctgagtcatcacatggaggagaaagagcaacagagccctctggtgtctcttcttatgaggacactaatcccaggatgaaggccccaccctcatggccatatctaaacccccttacctcctgcatcaagtccgctttcacactgctaataaagacatacctgagactgggtaatttacaaaagaaagaggtttaatgcacttgcagttccacatggctagggaggcctcacaatcatggggcaagacaaagaggagcaagtcacattttatgtggatggcagcaggcaaataaagagaccctgtgcagggaaattcccatttttaaaaccatcagattggctgggcacggtggctcatgcctgtaatccaaccacttttagaggccgagacgggcggattacctgaggccaggagtttgagaccagcctggccaacatggtgaaatcccatctctcctaaaaatacaaaaaagaaaaattagctgggcgtggtggtaggcacctgtaatcacagctactcgggaggctgaggcaggagaatcacttgaacccaggaggcagaggtagcagtgagtcaagatcagaccattgcactccagcctgggcaacaagagtgaaactccgtcaaaaaaaaaaaaaaaatctgatctcgtgagacttattcactatcacaaaaacagcacagggatgatccccccgcccatgattcaattatttcccaccaggtccctcccacaacacgtgggaattataggagctacaagatgaaatttggatggggacacagagccaaaccatatcaccttcctaaggtcccatctccaaacaccatcactctgggggttagggcttcaacacaggaattttaagggggacacaattcagtctacagcacctcccaacctgctcttgacctctaacaaggatatcaaacaagcccagatgctaaatttcagaacagaggagagacagaaaaaaagagtggttcctggctctgaaaggagtgtctgtatcaccggcaacctgagtggaaaagaaaaaagaaatctttcatttttatactttctattgtgtattttatagagttgtgattcccaatatgctagccactggccacatgtgactagtcagaattgagatgtgctagcaagtgtaaaatagacaacacgtttcgaaggcttaatatgaaaaaaatggaaatcatctcaataatcttttatattgattacatgttgaaatgataataggttggatatcaggttaaaaaacatattattaaattaatttcttctgtttgttcctactttttaaaagtgtgggttatgagaaaatctcaagttacacgtgactcactttggaggccaaagaagctccatcttggatactaatctgccaagttggcttctgatgaacccccattccaggaaggcctctaagatcccaatttctctatcatttcttgtatgattgcaggtacttaccataaatccttaggtcaaacaaccttgatgttatcctacttcaactgtctacacatcccttctgaaccaccctcccctctggtatacaagtcctgggtcttgggggtgatggcgcggggtccaccatcttgtcttgccactgccaagacacagacatggcttctgtccgtaagtccctactgaatgattctttctaaggaactagatatgccagcctctttctttggcctctcagcttcctcagatgttggggtaggtttgtatacacctgcccatggtaaaactcacgtttggcttgtattctattcatgttggatagcgctgacatagaagaacccaaaacagcccccagcacagccggccctcctgccttggtcagtgggaacaagcacatcagatcaagctctcatgggtctcaggatctgggatggtgctttggaactgaatgttgtggtgggaccacttctctaaggacggcaagatccaaggtgggctgtgagcactcttcctgagtgatggcctttaacggtccccagaggcagccccagggagatgaggacctggctggctgtccaaaaatctgatcaggctggctcttgtttggtttagggatacataaataactcacattttaaacactagaactcaggcatgagacgcccatgcctgcctgtctgttccctctgagccatgccttcatcgggtgggagaaccactaggatcacagcaccatctgcaatccctcttttttctttttttttgagatggagtcttgctctgtcgcccagggtggagtgaagtggtgtgacctcggttcactgcaacctctgcctcctgggttcaagcaattctcctgcctcagcctcccaagtagctgggattacaggtgcccaccaccacgcccagctaatttttgtatttttagtagagatggggtttcgccatgttggccaggctggtctcgaactcctgacctcaggtgatctgcccgcttcagcctaccaaagtgctggcattacagatgtgagccactgcgcccagcctgcaagccctctttcttatttcctccaagcactgaagcatgaatttgtggtaaggtaaataaacgtgtgtgtgtggcatggtggggggatacatccacagaatgtcacgtgcccagccctgttctctgtttgttacacttgactattaggattccagcctcttgttcacatacatagtctaactatttcctttttggtcagaattggaattctttcccttttttttttcctgctattataaacagcagtgctatgaatatctttattgttttccacttgaattattttattggaatgttttccctgaagtgaaattggttggctgggaggtatatatgattttatagttcctgtgattttccttttcatcaaatcactctcccaaaagactgcattgctatgtatcgccttctgcatgtacgtgtgtgtgtgtgtatgcacgtgcgtgtgtggacgtatgtgtataccgttttccctcagccctgccagctgtgggtttgatcatttgtatttatttttactaattaacatggtatataacagatatctcctggatattatatttgcatttgcttacttgctaacaagaatgagtaaagtccttctcttaaaacccagaaaaataaaataaacagccaccacatccatggcttagaaaaacacctctcagctccctcctatgccaggacttgggggcacccacagctgacgccaaggctgcgacacggctggccaggcccgagcttggcctgctgacctgtggctgtcatcatggtcctagaggcctcctccagctaataaagccatttctctcctccagccaataaagccatttctctcctccagccaactgaaggcacatcaggcaatgccctcttctgcatggcttagatgagtcctgcatttcttaattcccatatgttcgttgttgggattgagagacattctgttttacatgcaaaaaaggttgcaggagatgcggctggtgtcctgtccacagcttatgaaaacctcagggcagcctccgcaccctccccctggggaagttacaaaacagcatcctctgagagccactgtctgggcctggcctggcctggccgggacctggggagaggaggaggaaggccttgcctggctggcccaccagagggcgcctcccaccacaggtgccaggctgtgtccccagccctgtggcctcctggctctgcacacaacagccaggcctgcatccctccagccagacatctcagcccagagacacaaagcagtcatccagctaaaacgtaccatctgcctgggaacggcaacactgaagcaggttaatagctggcccagagcagatggtttattccaatgatgactgggtccctgtacccaggcgtcttccttagtgctgcctcgcccaccggcagcccgcagctctccctgggccaggccccactggaagggccagccctgctgcccagaaatcctgccactccgccacccagacaccgaacacccagacacctaacacacagacacctgacacccagacacctggacacctgacacccggacacccagactacctgacacccggacacctggacacccgatcacccagacacctgatacccagatacccggacacccagacacctgacacccagatactgagacacctgacacccagacacctgacacccagacatccagacacccggacacctgacacccagacacctgacacccggacacctggacacccggacaccgagacacctgacacccagacactgagacgcctgacacccagacacctagacacctgacactcagacacccagacacctgacacccagacacctggacactcaacacccagaaacctgacactagacacctgacacccagacacccagacacctggacacccagacacctgacacccaggcacctggggacacccagacacccacatacccatacacccaaaaacttgacagctaaacacctggacacccaacacctagaaacctgacacccagacatctgacacccggacacctgacacccagacacacagacacccagacacctgacacccagatacttggacacccagacacctggcacccagacacccagacacctggcacccagacagtcagatacccagacactcagacacctgacacccagacacctggacacctggacactcagacacctgacactcagacacccatacacccagatacctggaaacccaaacaccggacacccagatacccagacgtctgacacctggacacccagacacctgacatccagacacccagacacccagacacccagatgcccagacacccagacacctgacacctgacacccagacacccagacaactgacaccctgacatctggacacccagacacccagacacccgacacctgacacccagacacctgatacctgacacccagacacccgaatacctggacacccagacacctgacacatgacaccaagatactcgacacccagatacccagacactcggacacccagacacctgacctccagacacacagacacccagacacccagatacccagacacccagacatctgacacccagacacctgacacccagatgcctgacacccagacacctgacactcaggcacctggacacccagacactcagacacccagacactcaaacaccagacacccagacactcaaacaccagacacccagacacccagacacctgatacctggacacccagacaacctgacatccagacacctggacacccagatacccagacatgcagacacctgacacctgacacccagacacctgacacccagacacctgacacctggacacttggacacccagacacctgacaccaagaaacctggacacccagacacccaaacactagatacccagacacccagccacctgacatccagacacccagacacccagacagctgacacccagacacctgacacccagacacctgacacctggacccccagacacctgacacccagacacctggtgggatgtccgggtgtcttggtatcaagtgtctgggtgtctcggtgtcaggtgtctgggtgtctgggtgtccaggtgtctgggtgtcagctgtctgggtgtctgggtggtgaggtgtctcagtgtctgggtgtctgggtgtccaggtgtccaggtggtggggtgtctgggtgtctgagtggcagggtgtctgggtggcagagggtctgggtgtttgggtatccaggtgtccaggtggtgggttgtccaggtgtccaggtagtggagtgtctgggtgtctgggggttggggtgtctggatattcgagtggcagggtgtctggatggtggggtggctgagtatccaggtatccaagtgacactcggacacccaggcacctgacaccagacacccagacacctggacacccaacactcagacacccagacactcagatacccagacacccagaaacctgacacccagacacccggatacccagacacccagaaacctgacacccagacacccagatacccagacacccgacacccagacacccagaaacctgacagccagacacccggatacccagacacccgacacccagacacccggacactcagacacccagacactcagacacccagacatccagacacctgatacccagaaacctgacaccccaccacccggacacccagacatcctgccacctgaacaccctgccactcagtcacttggacacctggatactcagccaccccaccatccagataccctgccactccaatacccagacaccccaacccccagacacccagacactccactacctggacacctggacaacccaccacctggacacctggacacccaaacacccagaccctctgccacccagacaccctgccactcagacacccagacaccccaccacctggacacctggacacccggacacccagacacccggacactcagacacctcaccacccagacaccgagaaacctgacacccagaaacctggacacccggacacccagacacctgacaccaagacacacagacacttgacaccaagatagccggacaccccaccacccagacacctggacaccctgccactcagccacttggacacctgggcactcagccaccccaccacctagacaccctgccacttggatacccagataccctgttccccagacaccaagacacccagttaccccaccacctggaaaaccctccacccagacaccctgccacgtggacacctggagacccctccacccacagaccccaccaccaggataccctatcacccagacacacagacacccaaacaccctgccatcccaccacccagacactctgtcacctggacacgcagacaccctgctgtcccaccacccagacaccctgccaccctgccacctggacatgccaccacctggacacccagacaccctgccactcagccacctggacaccatgccacccagccacccggacacacagccacccagctgccccgccagccacatgtggctgactccctgctcaccctcccaactgcgtcagccatagggaactggggtggggtcccagcacccctgggcaggcagttccataggggattacctccagctgtctttcacagagagacagccaagctacagatcaatcaaccccattcataatcaaagaaaatgaatcaaaccagatgtcagtagtcacccatgaaattaatcaaggcataagacactagcactctgctccttggtggggatgcaatgagatgtgtgcccccttgatgggagagtaagttaatgataccgcctctccagaaaggattctgacctaataaaacaaccaaccttaaaaaaagttgcatacttcacggggcacagtggctcacacccataatcccagcactttgggaggccgaggtgggcagatcacttgaggtcaggagtttgagaccagtctggccaacatggcgaaacccagtctctactaaaaaatacacaaattagccaggcgtggtggcaggctcctgtaatctcaggtacttggaagctgaggcaagagaatcatttgaaccaaggaggcagaggttgcagtgagctgagatcacaccactgcactccagcctgggcaatagagcaagactccgtctcaaaaaaaaaaaaaaaaaaaaaaaaaaaagctgcgtacttttaaatccagcaatttcactttgaggaatgaatcccaaagactatataccagaattcaataaagagaatattaacacagtattactgtaatacttcagcattacagtagtaaaaatccacaaatggaattcacaccaggcacatggttaggcacagtggaatattatgcagccattacaaatatttacaaggaattttaaattacatcaaaaatattatttaacattcattgatacaggtgttcaaaggggcatataggataagaaggcaagtacgttagaaatatacatacataggccgggcgcagtggctcacgcctgtaatcccagcactttgggaggctgaggtgggcagatcacgaggtaaggagattgagaccatcctggctaacatggtgaaaccccgtctctactaaaaataaaaaaaaaataaaaaaataaaaattagccgggcatggtggcgggcgactgtagtcaaagctactcgggaggctgaggcaggagaatggcttgaacccaggaggcagagcttgcagtgaaccaagatcgcgctactgcactccagcccgggcgacagtgcgagactccatctcaaaaaaaaaaaaaagaaaaaaagaaaaaaatatatgtgtacctacatagcattaaaacaattgcaggaaagacaccaaatctgttaccagcagttttctgggttgtgaaatttgtagtttttatttcattatattttctgggtttttctaggttttcagcaacaaatactgacaaaaggaaatgaacagttttcagagacttactttaaaacagagttaaaggaatacacatgaaattggtaacagtggctgcctctggggtcggcataggagcaggccttcccttgcagcttgcgccctcccgtaccttttaaattttgtaccaggcaggtattacttattcaaaaataaataaatttctacaaagaagatacagatatataaatactaaaaccacaggagctgagaagcagcgcttgatttcctgggggaaatcaagaaaagtgctttcggctcctgggggagataagactccaggttcaggctgcccttttaggcccaaagcctccaagtcaccccaggacccagctagttccagtgtcttcactcagcaaggcctgctccatcggacacaaaactgatcaggagttggaccatctcctccctgggcatttttccctgcagtaggggtgggcaggctgtgggaggggctgcagtggacactgggcctctgagctgggaccacctgtgtcccctgggcctgacacagaccaggacctgatgcacgagtaagaatgaatggggcccaatcgcctaacaaaggcaactcaatttcagccccgattgttccagaaggatttgctgtaagcaaccggagaagttggcatttgttcaacatggaaaaagtgtcccccaactttgaagcactgaaccaaacatctttgttgaggtttcattctcacgatatctgcaaatcaacgttttttccttcacactaaaaacgggcaactttagagcccactaaagctatacaaaattgggagggggcatgctctgattttccatttttagttccagggtccgtatgcaggacttatttgcaggaagagcaggaatgatcagttcaacaagaaaagccacactcagttttcacagacagacaacccctccttcccacccctgccctgtcccccatcaacttaagtggcatataaatgattaaagtggcttcattaactccaggagtgtggcctgtgctagggcacctgatttgtgctagacgaggccagcagaagagcaatcgctctgcaagagaaaggctcggcccttccttaatcaccatgggttataattcaccctgacgtccttacacacatggaggtgccaggatactgagctttcctataagcagggcctcagcagaagtgcctccctccgagcctccagggcctgagaggagagccccaagtccctgccctgccccaggacctggggaccaaggaataacattttttgtagagatggaggtctcactatattgcccaggctagtttcaaactcttggcctcaagcgatcctcccactttggcctccaaaagtgccgacattacaagcatgagccacctcacctgacctactcttgcattctttaaagccacaaatctggtaccttccctcttgttccatttgtaagactttgaatattagagatattttacacataatatgtgggaaaatggctttttagaaaaacatttattgtaatcgatcacattcaagtcgtagttctgaaagcaaagtgaaaacacacagtacagctatgcctcagtatccatgggggatgggttccaggactgcaacctcaaccctcagacaccgacatctgaggatgctcaagtccctgatgggcaatggcatagcgtttgcacgtaacctacgcacaccttcctgtataatttaaatcatctctagatttcttataataccaaatacaatataaatgctatgtaaatatgctacaccatattgtttagggaataatggcaagaaaaaaaggtctgtacgtgttcagtaccaatgcaatttcttttttcaaatatttcctatccaaggctggttggatctaaatgtggagaccacagttacggagagctgactgtactggggaaatctttagggtagaaacatttcttagagatggtttatatcacaccacttcagaaagagcaatacaggcatacctcattctactatgctttgtgaatactgtgttttttttttaaattgaaggtttgtagcagcctggcatcaggcaagtctatttggcaccattttccaacagcatgtgctcactttgcgtttctgtgtcagcattttgaacagtaaatatttttaaattaaggtttgtacatttgttagacataatgctattgcacatttagtggactgcaatatgcagtaaacatgacttagatgcactgggaaactaaaacaatgcgcttccttgctttattgtgatgttggctttaccgaggtggtctggaactgaacccacaatatctccgagatatacctgtactttttactaaaaatatttcatttgagaagtaaacctcaagaactaccaggacttttcagatgggaagagcgaggccctggcagggcgagtctaggtgtgcagcctagtgggggccggggtcaagtccactcggtatttgtggcttcactcagcaggccgcccgtcccctccgtggggccattcgacagtccctgggtaggggacggttgcactaggaggtaaacatgattccagcatgggctgctccaaggccctgagaccccaggacctgcaggggggtgggatccagtcctgcagcaggtgctctgaagaggagtcatctcccaagatgagaaggccccggggggaggatgaagtgtggtcagaccgtcggctgagcgtgatcacttccccagacccatgcgggtgagaggactcagcagacgcctccgaagcctgcggcaggcaggcctttactcttcactggggggccagtcagagggctgtcatggcaggccagtgcacatgccaccaacacatgctgcttcatcagtaatttctggaacatgacactgcacagcggtggcctctccagcgggacattactagtaatacactgatgatgtggagattccccagggggcatccgctgggcttctcccaactcccaagccacctcttcagaatcacagagtcatttaaaggggccccccacctccccggaggtgcggcctagtcatcatactggatctcggcccgcagctccttggtgacgtagttcaccagcatggccagcagctgctgctgcagggcctcgctgcccatgaccagcgcggtcagctgcacggcgtccgtccactccaggtgcctgatgatggctgcggcttcgttaaagagcctctgttgctcggcagggggcagctccattaggatctgaggaaccggcttaaactgtccacttgtcatccaggcacctaacagccccccgacagccccccctagaaaacatggaatcgttcaattagtgggtcttattcataagcgatggccttacttaagttcccactgagtgcacaccaccatcaccatgagcaggcacattcatgagcgggctgcagcgggctcagccggtgccacgcctgctccgccagccagtgtggagggcaaaggtttatgcagtcttctgtccatttggctcagataattgacacccaacatgcattccctgggctccacatttaaggatgcaaaatgaagcctgcctgccccatctcccacctcagtgctgggcccactttcttcttcatgagctgacggaggtttctgggcttactgtaaaaatccctctctaatcacaaaggagaaggctgagaaacaaatgcattttctttttcttttcttttttttttttttttttttgagacggagtcttgctctgttgcccaggctggagtgcaatggcatgatcttggctcgctgcaacctctgcctcccaggttcaagcgattctcccacctcagcctcccaagtagctgggattacaggcgcacaccaccacacctggctaatttttgtatttttgtagaaacagggtttcaccatgttggcaggctggtcttgaactcctgacctcaggtgatccgcctacctcggccccgcaaagtgctgggattataggcatgagccaccacaaccagccacaaatgcattttcaagagaaaccatctcaggctgggtgcggtggctcatgcctgtaatatcagcaatttgggaggccagggcaggtggatcacctgaggtcaggagttcgacaccagcctggccgacatggtgaaacaccatctctactaaaaatacaaaaattagctgggcttgggggcacatgcctgtaatcccagatacttggaagctgaggcaggagaatcacttgaacccgggaagtagaggttgcagtgagccgagatcatacccttgcactccagcctgggtgacagagcaagactctgtctccaaaaaagaaaccatctcagtggtgagactgaatttcctccaccaggcagctgatatgctccttgcccctgaacttagaaaatcttcagtgagcccatgtggttaaaggacctggggacagataaggaggctctttcctcttgaagcagtgcttttcatagatcccctccaagttgtatgatcgataaataacaaactggccgggcgcagtggctcacgcctgtaatcccagcactttgagaggccgaggtgggcgaatcacgaggtcaggagttggagactagcctggccaacatggtgaaaccctgtctctactaaaaatacaaaaaattagccaggcatagtggtgggtgcctgtaatcccagctactggctgaggcaggagaatcacttgaacccgggaggcagaggttgcagtgagccaagactgtgccactgcactccagcctgggcgacagagtgagactccatctcaaaaaaataaaaataaatatcaaatgtaaggtagcttactatttctacttctgccaccctaaaagggcagaaacattattgttaaatgtaaactcattgccaaggctatgtcatgctattctgggacttaaagaccttgtatccacggaaagttctacctgaagaggccacgtgcagaatatggtgcagagaagcggaaggtgccctagggaaggggtccaaagtcaagtgcctccaagagccagggaggaactaagaagagtgaaggggcggttgggccttacccggcctctcccctgctgagattggatgggtggcaggctctgacttcatcccagtctatagtctgggccaaccaagccttgaatcgcatggaccttccgaggcccaggacacagaagagctggacagcttggttcctatggagtggcagtggctacttcacgccagttcattgctaccacacaaaataccagatttgtagctttaaaacatctcacgatttttaaatatcaccaatcagatatttaaagatgaagcccactagacttagtgactcactttcaacagacagagtatggaaagggaaacagaaactttgcagtggaaaaacccagcaaacatgcccttaaccaagtgttcaaggtgaatatcactgacgtcatgtgaatatcacacacccccagaattaatgcaagacaagggagaggggcatgtcacctcccaggcatgcctcccaaagactcctaactccagtcccatcctaaacacaactggcaaattcaaactgagagatgttctacgaaatacctgcccagtactcctcaaaactatcaaggctgtgaacaaggcaagtctgagaaagtgttaaaggccagaggagactaagaaagcaggcgattcaatgcaatgcggtgtcttagactggatcctgaaaccaaaaaaaaaaaaaaaaaaaaaaggccattaatgcagaaactggtgaaacccaaatcaagtctggagaatggttaatagtaatgtattcgttggtgttggtttcttaggtttttttttttttttccttagacagaatctcactctgttgcccaggttggagtgcagtggtgtgatcatacctcactgcagcctcaaactcttaggctcaagcaatcctcccaccttggcctcctaagtagctgggattacaggcatgaaccaccatgcctggctaattttttttttattatttttcgtagagacggggtctcattatgttgcccagtccggtctcgaactgctgggctcaagcaatctttcagcctcaagcctcccaaagtgctgagactacagaggcatgcgccactgcacccagcccattttagttttgacaagcatacagtaatacatgtgatcgctaggagaaccgaaactggatggaagatatacaggaatcctttgtactatcttcacgacttctctgtaaacctaatattattgggaaatgaaaagtttctttcaaaaatgcaacccaggccagagagaacccactggcaggctggactcagacaacaggcagcaaaaccagcgcttgcttcttctggaagccaagcaccgaggcccctggagcagacaccaccccgggtactgagctggggccagccccatatcccagaggctgaatgccacacgcagacagggttcacctcctctgcaaaagaaaggcacattctgggaagggaaaaccagctaatttacaagttttactgaacttttccccatgacaccagtgaaatgctccaagtcgacaagagttgcactcatgtgcactaaacctttatgagaacatcaatatttgatttagagcagcacttaatgcaaaaagtcgccaggaatatcgaccagcaaattactggctctttggagaggagaaaattcctttgttttcagggtaaaatgatgctcccgcccatgaccagggactggaagtagtgaatcccccgggctctcttagtggacatcctgttctctaccagcttttactcaatctgaataaaatatgtgctcccaaaatagcatctgggcacagctatatgacaaaatgatccccaaagccttcccctgagcactgagatggaggtgggggcacagatgcacagtgtcatcgaggaagaaggaaacagccttgtctcccccatctccggttccttcccggatggcaagatgctgaagtcaggcctcactaattcatggagtttggaaaggaaaatatggaaagggaaggtctggggccacccacacatttatttttctcctcagtgtgagcctcagcttaacgaaatgtccttgaatgtcaatcccactacagaagggaagaacagggcaggaacccggccagcgagctggggaacggaagccaacctcagcagaaaagttcagctctctgactccatctatggtttgggccacagccccaggccaggtagaccttctgaggctcaggacacaggaattcttccttccccaagccaaagaaagtaacttcatcccagctccaaggaacagtggaaaaattagccaaactttcattcattgcctgaaattgattctcaaatagaagcaggtggtaaatggccaggcacagtggctcacgcctgtaatcctagcacttcgggaggcccaggcgggtggatcgcttgtggccaggagtttgagaccagcctggccaaaaggacaaaaccctgtctctactaaaaatacaaaaattagccgggtgtggtggcacacacccgtagtcccagctactcaggaggctgaggcaggagaatcacttgaacccacaaggcagtggttgcggtgagccgagatcatgccactgcactccagtgtgggcgacagaatgagactcggtctcaaaaaggaaagaaaaaagcaggtggtaaaggaggtgggcaggccctctaagggtgaaaggcagttcttttggtggtctctttcagaacaagggagctctctcagagtgagctggctcacatgaaatggccacaccatatgtgctgagaaggtgcatggctcctcccagcctcctccctggtttcctttctgcagggacctcacagtcatgaaggccaccatgggacccaggacaccctggtatcttcagaggcctgctgctctgatacttattctgggatcccagcactgggggaaagatgcctctaggcccaaatgacacagatgccatttacaagagtaccccacacttctgagacattcacacagaagcctgcatttccaatggggcaaattatatctacaaagatcatttcccagaggcatctttaactccaccaactcctcccacaagacgcatggcaccacttgtacaagttcatttctccctgtgtttcttttcttttttctttttccttttttttttttttctttgagatagagtctcgttctgtcacccaggctggagtacaatggcatgatcttggctcactgcaatctttgcctcccgggtttaagcgattctcctgcctcagcctcccgagtagctgggattacatacaccagacacccgccaccacgcccagctattttttgtatttttagtagagacggggtttcaccatgttggccaggctagtctcaaactcctgacctcaggtgatccgcccgcctcggcctcccaaagtgctgggattacaggcatgagccacactgtgcctggccttctccctgtgtttcaacggcccttttatgacatccccgaggctggctatctctgtgagacacctgcacttaccaacggcgagtcccggtgggccgcccaccaaacccccgacgaaggccatggcccctgtgaccagggcacccttcccagagtgcttgacagccgccttcatcttcctctccccagaaagggagcacagcagcttcatgatgtcctccaccatgatagtcatcgtggcgggccttcgagggagaagttcagagggacagtttcaatgagcataagagtatttccatcacaatgccactctagttcctagagttttaaggaagggtcccccttttcaggaaagctcagcagctccaagcgcctgtatgacagacagcatccagacggtggaaagttcccacagacaggacaggcagcagttagtgaataagcaaatagcagcagctgagtggatgaaaggtcttctttgccctctgattaacttctgacttacgacagattaaggagcaacccggccacatgttctgctggttcatcacgagggaggtggtctgacccttctggcattagtggcctttgcactggcccggggaatgccctgcacacaaagcccagcagagaacgggaagtcccggcgtgaggcatctgagctgaggccaagccagagccagggaagggatgggaccctgtgaccacacgggcactgacctgcagtgggccctgagcagagggtcagatacctcccttctaagacggagacagtccctacaggctggactctcagacagtgccagcaggatgggcaggaagtgcctggcgtaagtctggaagcctgcaggctcccgacccaggatggctctgaacgaacactgttactaacacacacactgggctgccttaagcaactgttcttaaaagtcaacacagttgtacccatgggacactaaaagcagggaaaagataaagcagggagacaaagcaactggagaaaaaatacatgaaatcattcccaggctttgcaatatatatgaatagacagacggacgggcgagtagacctttagcacaatgacctttagcacaatcctccagggtagggaaaatgtgtggcatgctggagccagggcagggagagacgggctctggagagcccaaaggctgagaaaatcaaaggggccacgaggtggggggtctcctcagagctctggctgagcccaaggctccagcagtacttccctttctcaccagcacttcccatttcattctaggtggaaatattgaaacaggtgctacagcaattcaactgaggaagttatggatagattctattgcttattatcttttttttttttttttttgagatggggtcttgctttgttgcccaggctggagtgcagtggcatgatcacaactcactgcagccttgacctcctgggctcaagcgatcctcccacctcagcctcttgagtagatgggactacaggtatgcaatcaccacgcccagctaattttatttttatttttagtagagatgactactatgttgcccaggctggtcttgaactcctgggctcaagagatcctcctgccttagcctctcaaagtgttaggattacaggcgtgagccactacatttgaccttaatatctttgggttatatgttttatgaggtttttttgttttgtttgttcgtttgtttttaagagacagtgtctcttgttgcccaagctggtgtgcagtggtgcgatcatggctgactgcagccttgaactcctgggctacagtgatccccccacctcagtctcctgagtagctggggctaaaggcatgcaacactacgctcagctaattttttgttttcatagagacagggtctcgcaatgttgcccagcctggtcttgacttcctgagctcaagcaatcttcctgcctcagcctcccagagtactgggattacaggtgtgggccaccgtacccagacatgtgtgcttttctgacccaaggatgatccagaagcagaagtccctactgtaaaattgctctcccaatcctgggatataattttgagcccagagaacaaacccatgaatccatgagaggaccgcaaagccaggtcctcagaacttctctgcagtcccaggagagcatcctgcgctcctgcccctgtaaatttcccttctttttccccgttggtacacattagacctgtgattctccacaagtgcacgggaatcactgaaaaccttgtcagatacagccagtatgggagggtaagattctgcatttccaacaagcccccaaagtgctcctctgatctcactttgggcagcaagaccccaagagggcataacgcaggactctgacattcgttactcagtcttcaaattcagaaattgcaaacaagcacccctagatatgtctttttgtccccatggagtatgagaggcagtgggagggcaggccttgtgagccctgctcacataagggactggaggagcactcaggcctgggggtccctgctctggctaccctgtgccctgggtctcccaaaacctggtctcctgctttccaggccctgcccagctcctttgcttgctgacaggttgaatgcctcctccttctccccagaagagaacccccttccactattccagtggtcaagatttgtttacatacaaatgtctaaacgataaaatggcattataacagtgtcaggactgaacaggcagaagccacctggaaatggggagacggagcgcagaacctgatttatccagtcaccatggtcctgaaaagctatcacacaaacaaaatgacatagatagctagatagagatatacagagaggttttttttttttttttttttttgagacagagtctgctccgtcacctaggctggagtgtagcggcgcgatctcggctcactgcagcctccgcctcccacgttcaagcgattctcctgcctcaacctcccgaatagctgggactacagacatgcaccaccacacctggctaatttttgtatttttagtagagatggggtttcaccatgttggccaggctggtcttgaactcctggcctcaggtgatctgcctgccttggcctctcaaagtgctgggattatgggcgtgagccactacgtccagcacaaaatgagatatatttgaagtacatattaaagtaaccaaaggaaataattttacagtaaaatcttacaaaaagctcaaaatcctggtgtaaaatatctaatcacctttgagcttagttctggtttatatccagcttttcatctgtcaattatattggaaaaagagaggcactgcccaggtctcaggagggcccctttggaggctgcaaggaacctccctttccccgggcgtgaagaccctgagccctgccatgcttggtctgcaaggctggcttccaggccagcacccagacaccactcccaaaacaggttttctgcagttttgggtctgcactctcaaaacagtttctgcacagcaagaaaatgcatgtagaagtggaaagaaggaaggcaggaaacagatacataaccactttagctctactggcttccccccccaaaaaaaacctagcttccgacctgctccgaatgacttgaggtgaaaatctacagaggctaaagagatgtccttgcaaaaatgctacttccagctctacctgctccagccaggccagcatcaatgtgagaggagagagagaaatcaattaggcaaatagttagggcaagggtccttggcagaattcccttctaacaaaaagcagcctaagaagtcgttgccctttcaggaaacacagataaggaaggcaagctctaacacagaaagcgggtcccctgtgtgacatacagacatatggtgggccccagtaagcacagtcctctcccttcttagaaatactcaagacacggccggccacggtggctcacgcttgtaatcccagcactttgggaagccgaggtgggcagatcacgaggtcaagagatcgagactatcctggccaacatggtgaaaacccatctctactaaaaaaatacaaaaattagccaggtgtcatggtgctcgcctgtaatcccagctacttgggaggctgaggcaggagaaccacttgaacccgggaggtggaggttgcagtgagctgagatcacaccactgcactccagcctggcagcagagtgggactccgtctcaaaaaaaaaagaaaaaagaaatactcagacacagaggcttgcatggcactgataagaagagctaccctggaccaggcatgtctaccttggagtgttcttcccccccaccacccaacctttttcacacatgcacagtaggaagaaataagcaacatggagtagtaactcaggctaagaagcccacatgtgcactagaaacagtggggcgggggactcagaaattcgcaccttatgtaaatgaagcacccctcccaccagcttttctataaaaacccttgcatttcactgtaaaatggcaacccatctttctgggacccctctctgatccagagagctttctttcttttgcttattaaacttctgctctaacctaccctctggagtgtctgcgtccttgatttccttggccatgagacccagaacttcagtgatatctcagacaatgaggcaggtttcactgagacacaagcccagggttctgcagaatgggagggccagcagctatcactgcgtgtgtgagggcaggcagaggaagtcactgtgttttaatagtccagcaccacgggtagagatgttgtggctgactccatccaaggttcaatttctttgtagtaatcatttcagaagttagagcattaacaggctcttgttggggaagaaaggttagtaactccatctcctgagcccttgctaaaaagctcagcttcctgaattctccaggctcaccagattgagagggaagcccaccctgctccttctcccaccgcaaggctgcctttgtctgtaaatgacagggaagtgggtgaggagggaggatggggacagaccttagggggtgggagtgtggctccccctcccccactgtatcacacctatttcacactcagatttatccacataccaggccttgatcacaggaagcccatctgccagccacagggaaggcaaatgccaactggaagccccggtttcttgcaggcgcccaggctgctctgacaggtacagagagacggagacaagcccatctcaccgagagcggcctagctttctgagtttggaccagattgtaagagataagggagaggaaggcttcagatagctatgaagagagctatctgacctccaagtacccttttctttaacaaaaaattagatctggctcttgtcaacattgacctcccacctctccataccccagcgcaaaggcagtaggtggatcccaccagcaaacagttttggattagctcatagttgttgtttttttaaaacaaattagttgccaatatttaaaaatcaggagattttgcatgcacctcagattcctgatttctcctgaaaaatcagaagaccagatcacattggacctgccattctgtgtagcaatggaggccagggctgagcaggggccgtcccctgcccacccccatacagcagggccctgccctccctaccccagctcctcctggcagcatgcaccttacctatctacttgatcaataaacagatcacttcaaagcttctcaaagtatccctctttctttttttctttctttccttccttccttccttccttttctctttctctttcgttctctctctctctctttctctttccctctccccttccttcctgctttttgttgttgctggtgttgttgttgttttttccagaaacgcagtctccctgtgttgcctaggctggtcgggaactggcctcaagcaattcttccgcctcggcctcccgagtagctggaactacaggtgctattccaagatggtgaaaccccgtctctactaaaaaatacaaaaattggtcggggtggctcacgtctgtaatcccagcattgcagaaggctgaggcaggtggatcgcaaggtcaggagtttgagattagcctggccgatatggtgaaactccgtctctactaaaaatacaaaaaaattagccaggcttggtggtgtcgcctgtaatcccagctactagggaggctgaggcaggggaattgcttgaacgagggaggtggaggttgcagtgagccgagatcgcgccattgcactccagcctggacaacagagcaagactgtctaaacaaaagctcaacaaactacctgccatccccaaaactaatctcacctcctaaagcattaacgacccttcctgaccaaatctaaactagcgcccagattttcttcccatatggctcagcccagctccgctgccccacaggtgtcctgtcaggatccgcttcacatttataatacctagcaccccacccccagccccgcccctgccccaccagccacccccactctaccccacccctacccatcacattccgcaccccacccccgccaaacccacatccccaccccacccaacctcacccactcccaccacatccaccacccgcaccccacccccacccaccacacccatgcctacgccactcctgggtgacagcgagccagggcccgggactctagtcccagctctgctgcttacttgtgtgacttcagcctctccatgcctcagtttctccatagggacaatgactacactaacagtgtccaccccggcaccgggagggccgggctcccggcagggcggggaccctctccccaaggcactcccgggtctccaggcctgctcttggggtgccccctcctctcgcggggcgcggcctgggaggcgccccgccccggctccgggcgctcctttacctgggggagcggaggtctacgcggcgcgctcggcgatcagacgcggctgcagcccgggcctggcaggccccgggctccccgcccagctccccagccccgcggagggtcgcgcaggccttggtggcggccccggcgctggccccgccctccgtcccaccttccggctgcgccgggccttccgggaagccacgcgccgggccagctcctggctccgagctgcgcccggccttagggggagccgggggtcgctgctgggcaccccctccccggtcctggcccaccccgccgctgtcaccggggccctggcttgggttgcgggtggcgtaaggagacgaggcgcccggagaagagtcctgggaaccgcaaggccgcgctcccgcaggcccagccctgcctttctcccacgcgcacgcatgatcacatccgggccccgcgcacctgcctccaggaccgcggggacctcccggagacctccctccctttggcctggaggacccctctctccccgcagcctgggcacagaagagagcacaggggcatctggaggtcaagggtgctgcgtcagtatttggtgaatgtgtgggccggagccagatttcctctgttccagagcctgctctggagcctctgggtctgggggttgcaaaaggagaagcaggttgggtgggactcgtaatcccagctgccagtgaggctgaggagggaggattgcttgagcccagcagttcgagcgtgggcaacacagtgacatcccatctctacaaataataataaaaattaggccgggtgggtgagtcatacctgtgacctacagcattttgggaggctgaagcgggaggattgcttgagcccaggagttcgaggctgcagtgaactatgatcccaccactgcacttcaacctgggtgacagagtgagaccgtctcttaaagaaagaaaaaaaaggaaaagaactggctttgctcttaggagtcttggatggggaccaaagctgaggcaaggcagcctcttaggaaggtgcaaagggcatgaggctggggttgcagaactgcctgggaatactactttattgaggcctgtggaaagctgtccctactcttgtcatgcaaggtctggccttgaaccatctcaaatccaaaagtggcttctggggggctctatagagaattaatcctaacaggaaccctgcaaagcaggcatggttgtcactgctatattacagatgggaagctctaaacacaggctgctctgcccaaggccatcctggttagaaagtttcagggcccaaactccagcctcggtctcggtatctcaaagtctccgcctgtgaccagcactctgcctgctttccagggtgccatgggcacccagaggacggacccttttccatttttaaaagaatggaacaaacgctcttaataccaagcttccccaggccttggctgggataaaacaaccccatttattcctgaatcggagcttttgcttgagtttgggtgactttcaagagggaaagtgaactgaggccaggggaactcagcttgctgccttcctggggcctgagtgtggcgctcccgtttctctgcgggcagctccctctggcggcacattgcagaactggcctgcagactcctcccccagagatagtggggaagagggcctgtgtagggaaagatgctgggagtgaaagaagcttcaaagtccaggccctccagagaaggcaagcatgtaagaggttcatgcagcccagcgcggtggctcacacctgtaatcccagcactttgggaggccgaggcgggcagatcacctgaggccaggactttgagaccagcctgggcaacatggtgaaaccccatctccactaaacatggaaaaatgagccagacatggttggtgcaagcctgtagtcccagctactcgggaggttgaggcaggagaaccgcttggacccggcagatggaggttgcagtgagccgagatcgcgccattgcatgcaaatctgcaacccatcagcctcctgggcctcattctgatacgaatgcaggcataacatgaccgcacactctgaaccccagagatggagcacacagtgcctcatgctcctaaaggcaactgcggcctcctgcacagtgagcaaggcgtgccgtggggtctcggtggtggcgcggaaatggcactggcccagcacacagcgatgctttatgctgcttacagtgacctagggaaagttcttccacgtctccgtgcctcagtttcctcatctgggaaatggcaacaagagtagtacttatcctatagggttgttctcaacataaaaggaggtaatatatatgaatctagattattcttgtttacattacagaatgtgaaaatgagcggcttctccaaagtcccatgagcctcatgggcccaaggtagtgggaaatccagttctacccccaccttgacaaaacattctcttgctgatgggcccaacaatgccctagggtgctaggtggtgttcacacggccagccagagtcaaaactcagacggggccagcgttctatgccctcactttctcccaaagctgagtgcaccagctcctaaaacttccatggctccttcaggctaaagccacccacctagaccagggctggatgatccgcaatgtgggccacacccaaaaaccctatagcttcttttgttgtttcttttttttttttttttttttttttttttttgagacggagtctcgctctgtggcccaggtgggagtgcagtggcgcaatctcggctcactgcaagctccgcctcccaggttcacgccattctcctgcctcagcctcccgagtagctgggactacaggcgcccgccaccacgcccggctaatttttttgtatttttagtagagacggggtttcaccgtgttagccaggatggtctcgatctcctgacctcgtgatccgcccgcctcggcctcccaaagtgctgggattacaagcgtgaaccaccgcgcccggcctgttgtttctttttgttgttgctttgagacagagtctcctctgttgcctaggctggagtacagtggtgtaatctcggctcactgcaacccccacctcccgggttcaagcaattctcatgccttagtcacccgagtagctgggattacaggtgtgcaccaccatgcctggttaatttttgtatttttagtagagacagggtttcaccatgttggtaaggctggtctcaaactcccgacctcaggtgatccgcccaccttagcctcccaaagtgttgggattacaggcacgagccactgcacccagcccaaacttctctcttctgattgatagtcatattggattaagagccctccctaataacttcattttaacttgattacatctgcaaagaccctatttccaaataaggtcacattcccagtgatggggttaggacttcaacacatctttatacaattcaacccttaataccaggtgtcttaatctgttttctactgctacaacagaatgccactgactgagtaatttataaagagaagatatttatttgcctcatagttctggaggctggaaattccaagatctaagggccacatctggtgagggccttcttgctacatgataagatggcagaagttatcacataaagagggagcataagagagggaagagggccacccttattcctttatcaagagcccactcctgtgatcacagcattaatccactcatgagggcaaagccctcatgacctcatcactgctgaaaggttctcctagcaatttgggaggccaatgcagatcacctgaggtcaggagtttgagaccagccaggccaacatggcaaaaccccatctctattaaaaataaaaaaattagccgggcatggaggcacatgcctgtaatcccacctactcgggaggctgaggcagaagagtctcttgaactcgggaggtggaggttgcagtgagccaagaaaatgccactgcaccccagcttgggtaacagggtagactccatctcaaaaaaaatatatatatataaaatatatatcgtataatatatataacatatattatatattatataaaatatatataatatataagtttggacaaagatatagaattatataatatataagtttggacaaagatatagaattatataatatataatataatatatcagtatatataattgtactattatataattatatataattatatatattatatatataattatatatatataatttatatatatataaatatatatataaattatatatatatataatatatatatttatatatataatatacatatttatatatatattatatatatttatatatatattatatttatatatatttatatatattatatatatattatatatataatatataaatatatttatataatataaatatatatatttatataatataaatatatatatttatatatatataaaatatatataatatataagtttggacaaagatatagaattatataatatataagtttggacaaagatatagaattatataatatataatataatatatcagtatatataattgtactattatataattatatataattatatatatttatatatattaaattatatatatataattatatatatataaattatatatatatataaattatatataattatattatatattatatatataatataaaaaataaatatataaatatataaatattaaatatataaatatgtatttatatattatatataattatatattatattattatatataattatatataatacaatattatatataatatttaatataatatatatctatctcaccacaacggccattgaatttcaacatgagttttaaaggaaacatgcaaaccctagcacgaagtattcaccagatgccagctgtgattattataatctgagcacgtgcatagtacatacatgtccacccatggcacaataaaaataacagccttgggctgagcatggtggctcatgcctgtaatcccagccctttgggaggccgaggcaggcagatcacgaaatcaagagatcgagaccatcctggtcaacatggtgaaactccgtctcttctaaaaatacaaaaattagctgggcgtgctgtagcgcgcctgtagtctcagctactcgggaggctgaggcaggagaatcgcttaaatctgggaggcggaggttgcagtgtgctgagatggccccactgcactccgcacaccagcctgtgcgacagagcgagacctcgtctcaaaaaaataaaaataacagcctcgggttaagcgcggtggctcactagtgtaattccagcactttgggaggtcacggtgggagaattacttcagaccaggagttcaagaccagcctgggcaacatagcaatacctcatctttacaaaaaatttaaaaattagtcgggcatggtggcatgtgtctgtagacccagctactcaagaggctgaggtggaaggatcgcttgagcccaggagactgaggctgcattgcagtgagctgtgatcgtactgctacacttcgccgggcaacagagtgagatcctgtctcaaaaaaatattaacagcctcgggccatgcctatgtcaagactgttgtgtgcagggaaaccatcctgccacctcccttcggtcttgggagagcttaatcctgaaagggttgtggaaggacaaggtggcttggggactggtaatgatctcttcccaggcttcatcactgttcttttaaataattaattcatcttcttccttggtgtttacatccttcaaatatttgtagatggttatcatgtccctttagtcaccacttagcaccactctgcatatttgctgtcatgttgagtgtgtgttatcatcattgtcattattattattatttcctcccagctccctccctcagtccctcagccaccatcatcactcagtgaatttcctccaggttcccaacctttcaagtaccaggttacccaagatgggacattaaaagtcagtagtgatgacaagccctacttgtcacagagggcttgcaggccctctggttcctcactaattctcatcagtttccccaaagccacagcaaaaaaaaaaaaaaaaagacaaactaagtaaaaacagcatgcttacactgcaaacacagcttccagacaaatcccccagcccctgctcccaaacagataatcctcaattttctcaaatacaaaatcaggatgagaatccctgctctcaacaacctgggattattgtgaggattcaaagaggaataaaaactgaaaggtgctttgtaaactataaaacagggagggtggtactatcagcaatgccttccacataggatgggatttctacaaaatgttccagaggtcaactgttctaaaaagctaaaaattctaagttagaatttacaaatgaactcgatagagccaagattcacccgaaaatctgtctattgaaagaatataaagagatgccctacttaaaaatctactcatagatgttagtattccaaataaagtgtggaactcagagctggaggctgatggggccttggagtttacagatggccctgacgagactttagaaggtcaagctgctataaaagacttaaaaaaaatccaccttgtcttgcatttcagatctcactgaagagttcttctgtgcctggaagacttattttcagtctgagaagaatgatttttcaatggttctgttgaacatgcaattctcacgcaagtatttctataattatcctgtttcagttataatacagtttctggaacaataggacttttattgtattgccatatctgttataatagatgttttattacagaaaattatggtagagtcactattatgattctgaagtttttatttcaaattgctcagaggatgcaaattctttctcccactagttttactttaaggcagctttgaatttggggtgggggtggtttgtcttttcttctattggagctttggtctgtttgaggttttgttctatagcagaatgttctctttcgctccagtgtacataaatgaagtcacccatggtatttgcttgtttgttagcctgtggtgcacacaattttaaaaagaatgtcacctagattgtctctatatatctgcaaaatttctttcattattgctggagaagtctccataaccctggtattaattttttttgagatggagtctcactttgtctcccaggctggagtgcagtggtgcagtctcggctcactgcaacctctgcctcccaggttcaagaaattctcttacctcagcctccctagtagttgggactacaggtgtgtaccaccatgcctggctaactttttattttttatttttttagacgaagcctcgctctgtcacccaggctggagtgcagtgacacaatcttggctcactgcaacctctgcctcccaagctcaagcaatttctggcaaatttttgtatttttagtagggacggggtttcgccatgttgtccaggccggtcttgaacgcctgacatcaagcgatttgccctcaagtgacccacccaccttggcctcccaaagtgctggaattacaggcatgagtcacggcacacggctgacaaactatattttgagaaggtaaatactagtgatcatgaaacactaatactagtgatcatgaaaacagaggagctgaaacttctaggcacattcaggctaggtcacatcctatttcaggtggtagctccaccttgaaaagcagggggctggagattttcttggttaaattagaggctgcagacacccgcagctgctagaggcagagctgggattcaggaatgggcttgctgactccaacagtgaaggtcttcccctccaagagaccccacccgtggggaagggtgaccctcaaatcttggacatcaggtccaactttcggcccagttgacttttccacaaaggaaggatttcagggctctgagaagtcccagaatatctgcccacagcaatctagcatcatcagaacccaccttcacgtgtagccaccgtgtctccatgttcctggtaatgcacgctcccaggctcagagtctggaactgctgatggaggggcgggttctgggccctgcaaagaaccgaggctccgcagtcacagtcttcgattagacagagcccctccagttctcagacgatttcttaggctaccccgaaaatagagagaggaagggacctgcccttgatcacactgtcagtaacacaatcagaacagaaatctagggctcttggccttcaagcctctgttcttcgcttaacacacggctggcagagatggggagacctgagagggccctgagggtgagggcatttgcactgggtgcagagcgcctttggaaggcagggaagtccaggaaggtaaacacacacacacgttgtaaatatggcgaaaatcagagaggaggaaatgtcagggactcctccagcacggaaaacatcctgatagtttggagcgccgggaagagtgggcaccttggaatctgcaaggcattcttttgcgtttcacctgcagtggggtggggtctctggggtctgccctccctcctactctacatgcattacccatcttatagccgggccgtccctgcaaaattccagctgcatgggggaaccacacttctgacttcagaatgaaaccagtgttttgcacacattcattcctcagtccccttgctgggacccttctctgttatgaaagcagagatcccacccgaatagggtgactttggggcgatggattacctttggcaggtcctgtgggtcaggaatttaggggtgcagcgtgggcccacagcatacccagtagccaaggaagaccctcccctacccgaggctcaagcaggcgccaggccccaaaccctcactcctctctggtctaaatccccgccgtaggattttatttttcggtgctgaggtgctttgctggaggagctgccagggggagctgcgcggggcaggcccggggtaccagaggcccttgctttagcggcggccctgcgtgtgccagaggcttgcagagtgatctgagcacgccaagagattgctgtcaagtaagctcctccacaaatctgcagaaacctcaaagattacagcgctcgcacggcaggagcgcagcggcttcccatacgccggcagacaatggggcggaggaaggaaggggacggtggcctggggacccccgcgcccgcagcacgtgcaccgagcctggagcgcccgctttacagatcttgtcgctccacccctaaaacaaaggccccggggccccatctgtgccgggcgcgggggagggcgccgcacttgctgcccgccgcgtgcaaagcgagccagacaaagggctcagccctgcagacgcgagcagtggggaaataattaagcactaaggaaatattgtatgtggatttgagaccaacgggaaacgcgctcccaaacaatgctcgttgtttgcaccgagccgcttttctgctaagtttcatcaagtaatttgcatgccatttcaataaaattaacgaattatggtcgagttttttgttttattgacctaaaataaaaatcttcctttcctttattattgaaataattcgccccccatcccccccggctcccatcctctgggaaggctgcacagcgcgccaaggaaatctgtcctcccagccagaccccagcggcctttctgctgcgctccacagctaactccccggaaaccctgcgtttattctggctgccccctttgactgtggcaataaatagaacttcaaccctctcactttcttatgcctgcttttcttacagtgaaagcaccagatttccgcgtaggagggactcgggggcaacgatgcaattggaaggtaaggggcttctcttaaagctgcatttgcaaagcgagcacactgtttgctaaggttttatattgcatcttttaaaaaagataatgtggggcctggcatcgtggctcacacctgtaatcccagcactttggaaggcctaggagttcaagaccaacctgggtaacatagtgagacctcgtctctacaacagatttaaaaattagccgggtgtggtagcctgtgcctgtagtctcagctacttgggaggctgaggcaggaggatcactcgaacccaggagtttgaggctgcagtgagctatgattgcatcactgccctccagcctaggagacatagcaagaccccatttctttaaaaaaaaaaaaaaagactaagaaatcatcactaattggtattattaaggaacaacatcagtatcactgtagttgttatttattgctgcatatcaaatgcaaaacttagtggcttaagaccaatgtcctctctcacagctcccaagggtcaggaatttgagagtgctgtagctgagcggttctagattgggccctctcttgaggctgtagtcatctgaaggggtgcttgggcctggtgatgtgcttcccagaggaccactttctcatgtggctgggctgttggccatgaggcctgagtgcctcagcatgtggggctctccacaggctgttccaatgtcctcttgatgaggaagctggcatcctccagagggaaggatccaaacaaccaagcagaagccacagcgtcttcatgatctggcttaaaggttgcacaccatcactgcaacacccctacacattcgtccatgtggctgggactgcacagaggcatgaaggctggtaggcatggatcactgggtccaactcagagactggttaccatgagtgattatcattaatatgatttggtagggctgttgcaagtgcctggaggaggagagtattatacagctaaagccatcatttcttgtctttctagtcaatgcaaacaaaagtggtcagttacctttaatggtattcccagacaacaaacatggactcagggccttcccagtgccagctcccccttcagactggggaatagaacagtagccaagagagataaggtccccttctggcatccctgacttttcagagaaagaaaacgtaagtgtatgcatgaacacagcaaccagagctacaatactatcgagacagtgctgccaaatgggaagtacaggccaggtttggtggctcacgcctgtaatcccaccactttgagaagctggggtgggaggatcgcttgaggccaggagttcaagaccagactgggcaacatagagagccgtcactacaaaaataaaaaattagctggatatggtggcgcacatctgtagtcccagctacacaggaggctggggcaggaggatcgcttgagtccaggagctcaaggctgtgatgaggtatgatcgtgccattgcactccagcctggatgacaaagcaatttaaaaaaaaagagggaaagtcagggaggagactaagctctgagtgccaaggttggaggtctgtacaccctggtcctccctaaattgcaaatctgaaatgtcccaggcattgcagatttcctgcaagccaaacctgttagtagaacaacagacaaaaaataagatttttttttttttttttttgagaaggagtctcactctgtcgcccaggctggagtgcgatggctgcgatctcagctcactgcaacctctgcctcccgggttcaagcaattgtcctgcctcagcctcccaagtagctgggattgcaggcacccgccaccatgccagactaatttttcgtatttttaggagagacaggatttcaccatgttggtcaggctggtctcaaactcctgacctcaagtgatccactcgcctctgcctcccaaagtgctgggattacaggcgtgagccactgtgcctgttttgatattgtcacactttcatggaataccaacactcccccttcccagaaggcaggctccacaagggaggaggctgttatgtcttatttatccctgtagctctcatgcccggaatgattggtacataattggtatcactaatgactgtcattaataataattatctaatggctatcagccttgttggtgtccccaagtctttcaggtttaatggacgtcccccttaacattaacaaataaaagtgatttaagccctcagtctacttacagtgaaacatgagaactacagatgaaatcctcagcgccccccaaccaactgaacagaccccctcttggccaaggggaccccagaggaaacttaaccacagagttcccagccatgatgggaagggaggtcagacacaccccgctctacccactcccttttgtggcttaaacacaaatgagcagcattcatgttaaaatagaggtcatggtggtcgcagtggctcacgcctgtagtcccagcactttgggaggctgaggtgggaggatcaactgtggtcaggagttcgagaccagcctggccaacatggtgaaaccacttctctactaaaaatacaaaaattagccgggtgtgtgggtgcctgtaatcccagctactcagggggctaaggcaggagaattgcttgaacctgggaggtggaggttgcagtgagccgagatcacgccactgtactccagcctgggtgatggactgagaccctgtctctaaaaaataaaaataaaatagaggtcataagactggcagaatggactctgtgacagtaagataccaaatcataaccaggacctaagggccatatcagggaagggttaagtcacacacccctacacttaaagaataaactagtttccagctgccgcaaggggtttctttttctctagcagctaaacaagccaatggcttggagataggtaatattaaaacaattgcagttcgcccgctgccagacactaactgaccctcgttccaccagccagaactgcagctttgattggacaagaggctgattcagtaactttctcctgataagagaccactgaccatggcctggttctgcccatttacagaggctgtgcaatgccttcatgtccctgattcaccttttgacgtctacagcccgattgtaatacacttaaatgtgtattctccactccaaggtgaacatgggatgtgtgtaacatgcatgtttgcttatcacacatgtgtatggcctccttccaagaatattcatagctcttcctatatcccgttgaatatgtatacctggccaacccattcagcttgaattcctgtcttatcccctcccacccttcctcaaagtgcctgcctattggcttctactggagactacacttcttagccagtcagggtggctgccttgcaggttgtaactctatatgagaaataaagccctccttttctaaatgatttttaattattttaaatgagtgatttttaagctagcagacaccagcccggaatctctaaaggttgctgagagaggtggtaagagccacctgtgcgtttctcctgatcaggagcctctaaagcctgattcttcagggttcgcctcctcgcctccctcctcagctcctccagccctccctctgttcagtgtgcctggcccaaatgaactgggagctccagaccttctcggggacttccccaaagtctctataacacaaggtgttggtgccacagactttgactgttgggtctacagtggccagtgagggttcaatgtagcggcgtggctcaccaggtgcctggaagggaatattgagacctcctggttcttgagagttacttgggcccagccaggctctcagcatcttacagggtctcctgctactctcttatctgtggaccagcctcttcctggactccttttcccatatcagggacaataaaacactcacccactccaggccacagcttttggggtccagagctctgaactaacaccttatgtttagtgaggtcaaatttttaggcttagtgcccatctttcttctacttagttttattttaaattattttttagaaacagggtctcactgtgtcaccccggctggagtgcagtggtataatcatagctcactgcagcctggaattcctggaatcaagtgatcatcccacctcagcctcctgagtagctgggactacaggtgcatgccaccacacctggctaatttttaaattatttttagagacagagtctccctgtattgcccaggctagtcttgaactcctggcctcctgccttggcctcccgaagtgctgggactacaggcatgagccaccacacccagccccactcttctaagtggagggaaggtttagtctgcccccgtaacgaattatgcaacactctttcccccttagaacatacaagcactctggtcaaagtttctgagattttattttaggagcatttttcattttggctaaacatagacatatatacccacaagactgccggttaaaacaaataaaatatcatcttgaggaaacaagcacatcttgagtaagtttctttcaagatgttttggtgcattctatgctatcactttgcagaacaatttgttgtccatgcggtaactttaggggctgtctgagatggtctgttcctaaaagactgtggatgggagaggtgacagtaaatcctggagagtggagtgaatcccagccattctgtggacaggtgggctgagggagaagttcagagggcactctagagtgatttgcaacgtctcaaacagaaatataacatcttctttcatcctctgcagagtctggagctaaattcacacctttttttccccttccctcacttaaaatcaaattctcgcccttaatacttcctttcagaactgcaccgaaaatgacgatgtcttctcatgcatatgaattatccaaagtgtaggaagatgcgcccccactggagtacgctgaagcctttaacccaagtacatttaatgctgcgaagccccgagtgaggcaaaggtgtctttttattttagaagacatttaggacagttcatgtcactctgcacagatgcactgaaattgattgtggggcaaactataaagagagcttatgctccccaaatctgtttccgagccaggtaggatgatgaattctgaggtgggactgagggggaacggtggcagctctctcccctgcacgcaccggccaactacttccccgtttggacattggcgtgacaccctccttccctgttcatctgtgaaaatgtgcagcgttttcatttaaaacctcctgctccaacatggggccttctgcagaccgcagggacccccaacaattacttgttggaagaacaaatgaagcataaagcatgatactttattttaaacatacaggtggcacaaatttatttccaaagatttaagcacctgatgacttctccttagagaaaaagcaataaaaggagcctcttctgtcacaaatttccacttagcatggtttgtgcagaggcagaatttcaggcttttaccactgagctctggacatgaagcaaagctaacactagagggtgctatagattaggaaatccagggaccatgggcgccggagcgcgttcaagacgctgccctcccgattgtaacctaacaaactgagcgtgtcactttgccagaatttaccccttcaccatttctgctatgatgaaattatccagatatgtttaatttgaaattttaacttagtctgtgattatgtggaatttcaacactggctgtggcccagtgcagtggctcactcacacctgtaatcccagtgctttgggaggccaagtctggtggataatttgtggtcaggagttcgaaaccagcctggccaacatggtgaaaccctgtctctcctaaaaatacagaaattagcctggtgcctgtaatcccagctactcgggaggctgaggcaggagaattgcttgaaccctcaggaggcagaggttgcagtgagccgagatcacgccactgcactccagtcctgtctaaaaaaaaaaaaaaaaaaaaaaaggactgagcccaggtctgtaggatagacactttgtgtttgtatcttaagtactttgcgatctcacccttacaaacctgatactaaattccacttacctacttcagtccttctctgagggaaggtggagtttggaggcaattttaggaagcaggatgaggaaacagggaaggtgacacagtgaaggacaagccaacacaagggtggattaccaaggctggtcccctctacaggcacccagggctcggtcccacgcggactgctgagtagacagaagacctttcagaatcttctgcctctcccccatttgctgagagttccctgggaacggtaacccccgtaccttcgggctgaacatatgtttgcatgctgaatgggctctttctgccatcccatgccacagcattcaggaagccctggggccaaagcaaacagcatgcttgaggcaaggtgctgtgaggcccaaatgagctgaagcttgcacaaaactgctcaccactgccatagctgaatcagcggaggccaggaggatgcgaggcggtgcccgtgattgtctgatcatctccctcttggaccgctgagactcaggcatgccctgcatcaaatccaacctgtcaccaggtcttcaagggggaggcctgcggaaatcctactgtgaatgaaactacagttgctattcatcgtctccctcctgcacctaccactccagatgtccctcactcttggccagcactttggcttgtttaagttgtgtgccaggtgaggtgaccacaccttcccccctgcagtttctgagtctttcctgagctttgtcttggttggcccttggctgctgtgactgcctattttatctaattgcaggttcaagattcaccaagaaggcagggcgcagtggctcacatctgtaatcccagcactttgggaggctgaagcaggcagatcacttcagcccaggagtttgagaccagcctgggcaacagagcaagaccccatctctaaagaaaaataattattcaggtgtggtggcacatgcctgtagtcccagctactcaggaggcggaggtgggaggatcgcttgagcccaggaggttgaggctgcagtgagccgtgattgcaccattgcactctagctgggcaacagagcaaaaccctgtctccaaaaataataagtaaataaataaataagatactaagagacagcccagtgactctcctgagtcccaaacatactcatccatccctcatggagaaacaactctatctccttgcaataatcagaactagtttctcctgccagtttaatcagtactttttttattgcagtaaaatacacacaacataaaatgtgccactttaaccattttattattattattattattattattattattaagacggagtttcactcttgttgcccatgctggagtgcaggggcgcgatcttggctcactgcaacttccactttctgggttcaagcgattctcttgcctcagcctccggagtagctgagattacaggcacacgcagccatgcccagctaatttttgtatttttagtagagacggggtttcaccatattggtcaggctggtctcaaactcctgacctcaggtgatccacccaccccttggcctcccaaagtgctgggattacaggcgtgaaccaccatgcccagcccattttaaccatttttaaatgttcattcagtggcctgagttatatgaacattgctggacaaccattgctactatgtatttccaaaactttttaattgccttaaacagaagccttgtaaccattaagcaacacctccccatcccctctcccctcagcccctagtaatcactagcctactttctctgctactttgtctcttgtagatgtttcaaacaagtagaatgatatgatacttgtccttttgaaactgacttattttacatagtatagtgttttcaaggtccatccatgtggtgcatgtattaaagcttcatgcacttttatggctgaataatgttccattgtatgtacaaggcgtgccacattttgttattcattcacctgttaatggcaacttggcttgtttccacttttgggcccttgtggataatgctgcagtgaacatcagcatggatgtctctgagtcctgctttcagttcttcagggtatatgcctagcagtggagtagctgattctatgttaattctatgtttaattttttgagaaactgccatattgttctccaggctggctgcaccattccacattcccactaaccgtgcacaaagattccaatttcttaccaacacactctcatcaatacatgttatttttagtttatcgtgttttcatttttcttttattaatatatagcaggcattctaatgggtgtggggtggtatctcattttggttttgatctgcattttcctagtgtttagcgatgttgagtatactttcctgtggtcatttgtatattttctttggatgtgtatctgttcaaatcctttactcatttttaattgagttgtctttttgttattgagttgtaggagttccttatatattcttgattttaaaactttatcagatatatgatttgcagatattttctcccattgcatcggttgttttttcagtttcttgataatgtcctttcatgcacaaaagtgtttagttttgatgaattccaatttgtctctttttctttctttgctcatgtttttggtgtcgtatctgagaatccattaccaaatccaaggtcgtgaagatttacctatatgttttcttgtaagagttctgatgtttgtcattgatccatgctgagttaacatttataccgtataatgtaggggctacctcttcattcttttgcatgtagaaactccgttatcctaattgttgctaattgcctctggcccactgacttgagaagcccaagaggaccagggagtatttgtattttcaagttctgtagaattggtgatgttccctggtggaggagtccactctccgctcctcctcccccatcaagaactaagacgtcgaatttgctagagccccacccaaagctgtggacacaggaagcacacatttctcaaggtggtctctgcgagtgatggtgagagcagccgatctcactccccccgccaccccctgggtttccagccccatgtctttctgcttttgggatcatagcaccatgtgtctgctcttggtaaggcacgtacaccacagtttcaaggatagtatcccaattatacagggtgtgggctcacgctttcaccctggcatagccttggcacaggtcatcctgatgttcttgtaggcctgctgcttccagaggaaccttggagccatagcttctttgctgtaaaacagaccccttggcttgaggcagtgttgttcaaatcccctgccaataaatcagagacgaccgtaagtgctctgttggtgatgccagtgaaggcactgttgcaaggaaggaaaatccatatccagagtcggtgttcactctgctaggactcatcgctgtctcatcaatgacagaaggggtctcatataatgaactttgcactgtgactgcctgatctccttgtgaaatggtgccatcttgagggctcattattagtccatgtggttggcaggtagggcattcagtagcggcagcagccaggtcatctctagcaagagggaacttgtgttgggctcatgcctcccttgacttttgccaccatggccacaccattcatggaactatctatttcccctgccgtggggtggctgatgctggctgatgcccagaggatgaaccatcctgtccacccagttgctaggtgcctcctctgcaggagaggctttttggcagaccttaacgtaagtccaatgattggcacgctagtgccatttccataggtcagtagtactgatttttccttttgtctcagacaccaatatggctcggcacagcagttactgatcctgtctctatttgaaattttaatattttgctcatcatggatttttgtattaattttaactctttaaaatattgcattaacatattatgcatcttcatgttattattattcctcttcagcttcccaaagtgctgggattacaggctgagccactgtgcccagctcaaatgcattattttcactgctgatgtgttgctgttgtgtcctcccaatctatggcttaatgggtctcactgtaatcagttccaggaacaaagtcactcactgtcctgtgggtagtctccgagtctctgcgaggacccactgcacggcaggagctagtctcagactgaggtgagttctcggcagcagaaggcaccaccgcactcccaagggctaaaggtttaccctgcacctctcctactgaagcttgcagagggttggcatggcagccttcttcatcataggagactctaagactgctacttttggctcctctgggttgtgcagcttgagtggaagagcagatcctctcacagcctagacctcctggccagccgtttcttgccctagactccactccgagtggcagtctcccaagctgtctaataggcgtatgggagaagtatcagcaagtatgctacttctaatgtcccaggtggtgcacccagcactgtgcctcttccctagtgcagctgaaggaaagctgccactgcctgtgccttcctttacaagggttgtcctggcatgtgtcagaccactgggtcccctaacaaccttgccaatgtgccagtcctctgaatgtttctgggctttagcccctgcccttggcttgcacgtgtcttcttcctaggacatccggggtgcttgtgtcatatgctggtagcataatgtcatcaacagtgcaccagtgtgctgtgcaaactatcccgagacagcctgtatgcatgcaaagtatgctcaaaagtacccaaggccgaggcgtggcagctcatgcctataattccagcactttgggaggctgagactggtggatcacttaagcctaggagtttgagactagcctgagcaaaatagtgagaccctatctcaactgaaaacaaaaaaagaaaaagaaaaagaaattagctaggtgtggtgatatgcgcctgtggtcccagctactgggaggctgaggtgggagaattcattgagccctggaggctgaggctacagtaagctgtgactgcactattgcactccagcctggatgacacagcaagactctgtctcaaaataaataaatttatttattaataccacatcaatcggtatttcccgattttcataattgaactgtggttgtataagagaatgcccgtggccaggcgcagtagtccctgctacttgggggttgagacaggcgaaaccccgtctccactaataatataaaaattagcaggtcatggtggcacatgcctgtaattccagtactcaggaggctgaggcaggagaatcgcttgaacctgggaggtggaggttgcagtgaaccaagtttgtgccactgcactccagcctggacaatagtgtgagactccgtctcaaataaaaataaaaataaaagaagttgcctggcttagttgtgcttactggactcagagccccacatggagtctgctgacctgtcttgggattgaagggtgataggtgagaaggatggagaatttgtaaagggccggcagtctccctgatctgtctcttctaattttgtagtcggactcctcctatttggttcctgggcgaccttcagttcttgaattttagggttccaaacaacaagtgttaagtgaagtttggggccttttaaaaggtgtcagtgcttgaaatttgagacaataataatagctgccatcttacggtgagtttgtcagctctgggttgtgaattttatgtctgtgactgcatctcatctcattgatgtaaaaagtaaaattagttttgccaagtactgccttcagtcattggaggttggatttccctgtttccaactcttagggagtctctactggggccagtgtgtcagcatcaccttggccccttctataccttaatgccctcgctgaagggtaagctgggatccctttggccccacgaagcattaaagccttcatgtcctctcatcaacacaccccattccagggcttctgtgcctccccagcctccatgtcccgtccccggggcctcgagagctgctgatgcttctctacaccccctcagagggctgcagggaactggggtgggtgtgcccctgtctttcctgcccaggctaatccgcctcgcactcccttccagcctcctggcttgggacatttcagtgtcctccacctttataccaaagactgtgcccctgtcactatatccatgtcagcctctaagcccccggctcccaggaccacatgccaggccctctgatgagctccccagccacccttctgtaagggtgtgcaggtcctgagcacagcaggcactcaggctggaataaggtatggggcacctcttcccgacggcaccctcagtctctgcatgtggctctctctactggaatttgggaggccagggcaagcatctcccttaggctcccccgacagcatggggagacctcagccctcccaccagcctgagcggtcccaagctcagccgctagccacaagccccaggtttgctgcccaggcccaagctacccacgggcagtgagaaaggtaccatctcccagaatgggaccctcttgcctgtgtggtcagtgccctttctcctggatacagaccttcctgagcagccaaaacttccttctcgcccgacgggcaaggagacctgaggattaaccgcatgcttagcagcttcctggaggcccccccttggaactggaaatagtcctggataccatgattgaagcaacttcaggctgtactgagcccacgcctggctctggggttgccctcctctgcacctcctgtctggtcacctcttgcttttcctatgctatgcagccaagcaggtgaccaggaaggcctctcacccagaagccacctggctcctgctacccactgtgcacttgttccaggtgcattcccaagggccgacttccttggttcattttgacaaactttgaggttgctcgtcatagcccttaagaatggagacaaacaccctccctcccccattttccaacccccgatgtacacgggcaaaaaacagaagctcagagagggtgaggactttccacagagtcacacagctggtgaagtcgctggtctaagcctttaactagggccaacttgacccttcacctgcctgccttttcccacccctgccctccctacaggtgctgtctgcatgtagaatctttcaggcccagattcaggatgtccagctgagtgtgggaagggtggtgtggtatgggcccagccacatggtagctgaaaggctctggggccagggggtcctagctcccagccccgccccttagagcctcaccagggactcaagtctattgacacaagggccagcacctgtcacgaggtcatcttccctaacatatactttcatttaggggcaaagaacttctctttttgttattttgcattaaaataaccaagattcatccagacgtggtggctcacacctgtaatcccagaactttgggaggctgaggttggaggattgcttgagtccaggagttagagaccagcttgagcaacatagtgagactccatctctacatagaattttaaaaacttccaaagaattaaaaaatatatattagccaggcgtggtagcatgtgcctatagtcccagctattgcgaggctgaggatcacttgagcctgggaggtcgaggctgcagtgagccctgactgcactactgcactttagcctgggagacagagtgagaccctgtctgaaaataatcaagatcaaccctggacagaaaggaattgctagagtaataccctttgacctgaaatgctgtggggtctaaggtgctgccttcccctccgccctgtgtgctagtccttgtatgttaagactcagtagttccccgtatcccagtaaaaaggcaggggtgggatgatgggtacactaaaatcccattccccaccagcacacaatatactcaggtaacaaacatgcgcatgtaccccttgaatctaaactaaattaaattttaaacaaacgcaagggtgtgacctggatggagtggtacagtcatcccctggcaccaagcagcccattagcccagaatggttatctgatcagatgcctgtctcctatggacctatgggagctggacacagggaaggagcctttgatgccgtggaacaaggtggaggaattgtccatgcgaagtggcccctgaagaactggtacgaaggggttggctgcagtggtttgagagtcagggactgggttgggggcctgggcctacaaggctttctaagccccctaggactggggactttgtcctggatgctatgggaggccactgaatggggtgggataaggggcaggaaggatgggtccacaagaaaactgatcagagtgacttttttttttttttttgacacaaaggcttgctctgttgccaagctagagtgcagtggtgcaatctcagctcgctgcaacttctgactccctggttcaagcaattgtcctgcctcagcctcccgagtagctgggactacagttgcgtgccaccacgcctggctaatttttgtattttcagtagagacagagtttcaccatgttggccaggatggactcgatctcttgacgtcatgatccacccacctcagcctcccaaagtgctgggattacagatgtgagccacggcacctggcccagattgacttttaaaagcaggacccagggccgggtgcagtggctcacacctgtaatcccagcagtttgggaggctgaggcgggcagatcacttgaggtcaggagtttgagaccagcctggcaaacatggtgaaaacccgtctctactaaaaatacaaaaattagccgggtgtggtggcgcgtgcctatagtctcagctactcaggaggctgaggcaggagaattgtttgaacccgggaggtggaggctgcagtgagccaaaatcacatcactgcactccagcctgggcgaaagagtgaggcttcatctcaaaaaataaaaataaaaataaaaaatgaaataaaaaattctggccaataaaacaacaacaaaaaagatcctggaacccttctttctccttcttgctccctctcttgccacatgacatgcctgctcctccttccccttctgccacgaatggaagtttcctgaggcctcaccaggagcaggtgctggtgtcacgcttcttgtacagcctgcagaaccgtgaactaaatcaacctcttttctttttaaatcactcagcctccagtatttctttatggcaatacaaaatggactcagacactccttgatctcaaacgtcccagctttcagaacggtgaagcataactgttcattgttcaagccctggctcatggtattttgttatggtggcctgagctaatacaggaggccggctgggggcctggcccttgagagatgggggaggcttagagcacagcggcaggggagtagggaagaagcagacagggtagaagacacattctgtagtgacagacccactcactggttatggtctggagactgggatggaagaaaaaggacctcaggaatgactgccaggtttctgggcttgagctacaggggaggtggagacactatgtcctgggcaaggagttttgttgtggaagttccagctctggagcactccagcctttagaggtctggttaaggagaagcccaagaggtgggaggaagacaggagggtggagagtcactgagactggtgcacagtgtctccagaagcacggagcaccccctttcaatggcaacctggctttgtaggacttttgacacgcttacccccaccggctttccccgcgcctgcatggcctctctaaccatccacatccatggtgagggtccctcccttgcctgccattgctccatccacccagtccccaactcggtagatttgtattgtgtccatcctttgaggctctcctccactcccccagctcctgtctcagagtcccccagcctcttgggtccccctctgtgtcttgtgtaagagctgagtgtgctcttgtctgtttcccaggaggtgagctcctcacgtacaggggtcgcgctgcctcctcctctgactccctggctctgagcgaaggctctggcatctgtagccatgagaggaatgtttgccgagtgaccccatgagcgagtgatgccagcataaaggccagtgcacccaaggctggcccaaaatatcctctggcaaccagagccgccccgccgggggatgcattctgcctttgaaagtagtgagtagcacatccttacaggtacccaagaggagaaggattggacactattcagggtggaaatggatgaggggatccctgcgatgggggagagggtctgactacccatcccctaaggacagtccctggtctggggcctcccagcctgagaacgaggcaggagccaccaccatcggaagctgtcagattcacagtcataattccagagtgtgacacttagttaatctgaaaatatttgctaacctattatgaataacaatatttgcagcttaaaatgcttaccctccatagctccagagtgtgaagatgtgcttctacccagacaaagatgtactcactactatccgagcaaattgacacagggagcttatgagcctaattgttggcatctcaggctgatttgcgtcccctggggccactctgataacttggctaaacaaatacaggaggtgctgtagggacaggctcacagggccagagggctccatggagccggatgacggggaagtatttcaggcctctcaccagaacctcctgctatgctctgaatgtctgtgtcctcccaaaattcatatgttgaaatcctaattccctacgtgagggtattaggaggtggggcctttgaaggtgattaggtcatgagagcagagcccacagtaatggggtgagtgcccttatataaaggaccccaggctggttgtggtggctcatgcctgtaatcccagcactttgggaggctgaggcgggaggatcacttgaggccaggagttcaagaccagcctgagcaacatagcaagacctcatctttaaaaatatatatataaataaataagtaaaaaggatatcagagagctctttgccccttttctgccatgtgaagatacaatatgaagtctgcaatctgtaacctgagagatggggtttcaccatgttggccaggatgatcttgaactcctgacctcaagtgatccacctgtctcgtcctcccaaagtactgagattacaggtgtgagccaccactaaatttctgtttctgataagccactcagtctacggtactttgtcaaaatagcctgaacagactaaggtacccccctcaccccatctcatcacagagtctctggactttttttcttggctgcctatatggttcttagggtcatcttcacagtcagctacggggtgtggccaggccccgtgggtatgtggttaaggtcattggctaacatggatgaccaaggccattgcagttcccagacactgagaggctccacacacttgtggatgggggtctgtctttcctgaggaagggtcaatggccagctcgaggctgtgtccacagataaagatgtttgcacagaatgtggagcccagaggagacaaggatctatcaagggcctcccaggagcttgtgccagaatgtgcaactcaagccagtgttggcatgaaggaaacttggcgtaactgcagagaccacggcttcttcagagcctcacatctcctgtgttggtgccatcgcagctgcacagcccccagccctaacacccaggacacctgaagcaagagccctttcctgtggctccagctgaaatccaggggcccctttctctccctagcccaattcatgccccctctaaacctttgctgtggccagggtttagagggggcattgctggccccacccaagaggcaaggtctgaaagtggagaaagacggattccccaagactagctgggatgctcttacaagaatgacagaaaagagatgctggggctggatgcagtggctcacacctgtaatcccagcattttgggaggccaagatgggtggatcacctgaggtcaggagttcgagaccagcctggtcaacatggtgaaaccccatctctactaaaaatacaaaaattagtcgggtctgatggcaggcgcctgtaatcacagctacttgggaggctgaggcacgagaatcacttgaacccgggaagtggaggttgcagtgagctgagatagtgccactgtactcccactggggcaacagagtgagactccgtcgaagaaagaaaaaaaaaagaaaagaaaaaagaaaaaagagatgctgggcaggagaaaagcctcccttgagggaaaagagaaggaaaggaccaactgccttggcccattcagtgatctggccatgaaaccaggggctggctgaaatgtcattgtccaagaaaaggtgctggctgtgcacagtagctcatacctgtaatctctgcactttgggaggttgaggcaggcagattgcttaagcccaggagtttgagacaagtctgggcaacatagcaagactctgtctctacaaaaaataaaaaaaagtagctgggtgtgatggtgcacacctgttgtctcagctactccaaaggctggggtaggaagatcactcaagcccaggatattgagactgcagtgagctatgattgcaccactgcactccagcctgggcaacagaacaagaccctgactcttaaaaaaaattttttttaaaaaagagaggtgctggtgaccatgatagacagcgattcagagcagagagagaggaggcccaaatagcttagtcctgtccacagtggcagaggaaatgggagaattaaggcaatttcaatgaaaacaacaattttaaaaaaaatgccccacccaatgcttatacctcaattatctagatttgctcaagcaggaattatcagaataacttaggaaaagcttcttttgggagtaaggacaagagggcaatcgtggccaggcacggcagctcatgcctgtaatcctagtactttgggaggctaaggtgggtggatcacttgagatccaatcatttgagatgaggagttcaagaccagcctgggcaatagggtgagacactgtctctactaaaaatacaaacaattctccaggcatggtggcacatgcctgtagttccagctactggggagcctgaggcacgagaatcacttgaatctaagagcctagatggtgccactgcactccagcttgggtgacagagcaagatctgtctcaaacaaacaaacaaacaaaaaaaaccaaaggatgactgacctgtgtcaacatccagagttcccatctcagctatgtgcacaggaagggccagtctttctcctttactctcattcactctacagatgcctaccgggtacctgccaggtgggccaggccctgttctcaccactgctctgaatggtcaccacagagaatggtctccctcctctcagggagcccatgttctgcttggggaaggcagccaacaagatctaaagcgtcgctgagtgacagggacatgtcctgtgaaatgcatggagaggtgatgttgtcattgtgtggacgtcacagagtgcactacacaaacctggatggggttgcctactgcacatctagactgcatggtgtggcctgtggctcctagaccacagacccagacagcacgttactgcgctgaatgccgcaggcagctggaacccagtggttaagtatctgtgtacctaaacaaatctcaacttagaaaaggtacagtaaaaatatagtattatcattgatgggaccactgtcaccactgcacactgcctttgacccaaacattattcggtgcatggccatcgatgatggagattgcgattcgtgtactggagaaaataaagcgaggtgggctgagagtgggaggcccgcagggcagggcactttggatcaggttgtcaggaaatgcctccccgaagagggcgcatttgcaattaaagccaagtgacaagaaaaaactgccatgcacagatctggggtctagagggtggggcaggagggacaacaagagcaaaggcactggggacggaagggcttcatgggcagtgggagccccacgggagccccctaggtctggcttgcaagctctctggccctctgctggacaccccagagcaagccagcccctgcctgggactccctgaacacactgcccccagagaaccacaggcagagggactggctcacctgagttccacaggaaagacagactgtcctgagaacagacactcgctcattttcatcactgttcctcaaacaagtagattttgttttaaagcaaacaaataaacagcgttgtcaagttggtcaagtttgttgtttcttacccaaacttcccctttaaatcttcggcaggacagaggaggaccctgggcttcttgtcaattctctgacttcaaggaagagtctgatcaacccaggctcactcgcaggcttgaaaggggcctctagcgaggccagggtgggagcagagaccgtaacaaggcctttttttgttgttgttttttgaggcagcatctcactccgtcacccaggctcaagtgcagtggcacagtctcggctcactgcaacctccgcctcccaggttcaagagattctcttgcctcagcctcctgagtaggtgggactacaggcccatgccaccacacctggctgatttttgtatttttagtagagacggagtttcaccacgttggccaggctgctctcaatctcctcacctcaagtgatccacccacctcggccccccaaggtcctgggattataggcgtgagccaccgcgcctggccatgtatcttttttgttatttgtaattgtcacttgtctagtgttttggtgcgcacatttacagaacgaagcctgctgaaaagctttaaagtacagcacactaatgattcctgagatataggtataggtctctctctctccccgtttgtctgtctgtctatctatctatctatctatctatctatctatctatcatctatctatctaatctgtcatcgagagagtgattgtagatagaggcacagatacagatacagaaactggaagctattttctgaaaatagagtggcatccaccactgtggtccatggtgatgcagccctgcgggtgggtctggggacattagcaggcagggcaggaagagtctgggagccagggagccttccccagacctctagcatccacccccaggcttttccactgcactgtcgacactgaaggtcaagttatgccccagactcctactgctggaggggcttgggccatattcccagggccagtgaggccaggaagccagtacttccgttagctaagaagtcaccaggcacaggaccccaaggctcaggggcactcgccagtgatggctgcagggaaggtaggagacgcacagcagcaggccactgggccgggctcctataccacctggaggagatgtgacagcctcacttccaggagcctggccctggccagcagcgtctgtggtcctttggcaggcagctagatgtggccactttgcaggtggcctttcatagcacctagaatgcccctgctcactcatctgtgaagcaaggacgccactctcactctgcctgtcttgctgtcactcaacactcaacaggcattgggcacggtggcttacacctgtaatcctggcgctttgggaggccaagtcaggaggatctcttgaggtcaggaggtcaagaccagcctgggcaacgcagtgagacgccatctctaccaaaaaataaaagtaaaattagcctggtgtggtggtgcacacctgtagccccagctgctcaggaggctgaagtgggaggattgcttgagcccagaaggttaaggctgcagtgagctactatcacgccactgcactccagcctggggacacagtccgatcctgtctcaaataaataaattaattaaataaaagaaaaaataggccagacatggggctcatgcttgtaatcccagcactttgggaggctgaggtgagtggatcaggcacccgtcacctgaggcccaggcatgaggcacccatcaccacgcccagctaattttctatttttagtagagatggggtttcaccatgttggtggtgggctacgttcccagggccagaactcctcacctgaggtcatgagttctacaccagcctagcctggggtcagattgcttgagtttgagagagcctgggcaacgtggtcagaccctgtctcaaatttaaaaaaataaaaataaaaaacattcaacatatatgtttggagcacctactatgtgccaggcctcaaggtcatgagaaacaaaggtggatgaatgattcgaagacccgcctctggcctccccagcactgacagggtgggcttatgaaagggcttctagactgctcaccggcctgcacgtgggacacggaacctcctctgggacatggagcctactctgagggcagagattgagcatggtttacagcaggtgtgccaccctccaagccagaacagggcctaatgaaaatcccatgctgaaatatttctgtattttgtaaggaatattcagtgtcacaagaatgtgaggctgtggggtcagatcgtttcatccagcttctggcacaattcagtgttcttgggggagacccgggaggtttaggaatagaaaatggatgggactggctgggcgcagtggctcacacctgtaatctcagcattctgggaggctgaggcaggtgcatcacctgaggtcaggagttcgagaccagcctagccaacatggtgaaaccccaactctactaaaaatagaaaagtagctgggtgtggtgatgggtgcctgtaatcccaactactcaggaggctaaggcaggagaatcacttgaacctgggaggtggaagttgcagtgagctgagattgtgacattgcactccagcctgggctacaagagcaaaactccatttcaaaagaaagaaagaaaggaagaaaggaagaaagaaagaaagaaagaaagaaagaaagaaagaaagaaagaaagaaagaaagaaagaaggaaagaaaaagagagagaaagaaaggaaagaaaagaaagaaaagaaagaagggaagaaagaaagaaagagagagaaagaaagaaagaaaaagaaagaaagaaaaagaaagaaagaaagaaaaaagaaagaaagaaagaaggaaagaaaaagagaaagaaaggaaagaaaagaaagaaaagaaagaagggaagaaagaaagaaagagagagaaagaaagaaagaaaaagaaaagaaagaaagaaagaaagaaagaaagaaagaaagaaagaaagaaagaaagaaagaaaagaaagaaaatggataggactaaaccaacttaaaggtctttttggagtccaaagattctccaagtctcacccttctttccctgtccagaaaggctgattccagccaggtgtggtggctcatgcctgtaatcccagcactttgggaggctaaggtgggaggattgcttgagcccaggagttgaagaccaacctgggcaacatagggataccccatctctatgatttaaaagataaaaataaaaatgctggttcctgatggcccaaccttgcctgttcacaccagctctgggcctgtcccccatggaccaagctctggattccttgaaggccaccagtctccagcctccagtccagggtcactgttcctaagggcgtgcccagcctgaccagatcctcatgtgagggaggcacagggacaatgttccaggatgggcccttatgcctgctggtgatgtcagtgacaagcccagggctcagcctgcctctgtgtccttctccaggtgggtttgggcagcctggaccagagggtgcaatgagcttgtctgaccccatctgtgccgggagggcgggggcctgcattgtaagtctggccgtgggggccctcagtttctgtcctgtatttttacattctaattatttcatatatggccttctgatggactcatttactgggaagctaaagatacccttcaatgtctaaaaataaacctgaactgctaaaaattcagcatttctctccctcgcttccaccagctgggcctgtctgcttttactccaacaccatcaggagctacaaacaagatttacaaaagccagcaagtttacacgggcctgaatagcagattctcttttatcttcaatttgacaaaacattttggggttgttattattgaggctttcttttcttttctttctttctgtcctttgtttccttccttccttcctttttctttctttcttttctttctttctttctttctttcttcctcttcctcttctttcttcctttttctttctttctctttcttttctttctttcctttcttcttccctttattctttttttctatcacttcttctgctcctttagtctagtatttaggaaaactttcgtccaaatgcaagcttccaagatgttctccctctggtctgccacacctccttttcttacttcaattattttaagacactctcccaatttctatgagtaccatgcggatggcctgaaggccagttaagaataaacctgctaaaccaataaattacattcactcttatttccagaggaacgcttttacataaatatctgccatagaaataaatcagataaattaataagaactccctcctctcctcaaaccaaacagtgaacagtaatggttatcagaccagttaaaagaataaacctattaaataaataaatttgctctacgccaatttatgtcaccaatgtacttaaggggaaaccttttaaaagagtagatttacagtgcacacacagatctccactgggtatgtgtaattatgcataagaaagacattacttttaaagtggatgaatgggcgatacttttttgatttactgctagaaacagaaaaatggtaatggcatgaaataagcgtttgcaaacccatttcggaagacaggaaatgcttgatttacctagggcacccatcaggttctgtatttcagatcaaagtagataaatggtaaggcaaatggatatttggggggaaatctatagcctttctgtcaactctgcaagttaaatgtttggaataaaaacgcagagagtgtctatatgcaaggaagaagtcatgatttattagcaatcgggcaaatggaagtgggcagtgcttacctggaaggtgaggatttctcagatacgagggctgtgggctgtgtccacaattcctgatgtttttagctatgaaatctggtggccagctggtccttctcacccaccccaagccacctaacagctgccctgaatgctgttcttgttctaacctcttacttgcactttattttattttatatttatttttattttttgagacagagtctcgctctgtcgcccaggctagagtgcaatggagtgatctcggctcactacaacctctgcctcccaggttcaagcaattctcttgcctcagcctcccaagtagctgggattacaggcatctgccaccacacctagctaatttttttttatttttagtagagacggagtttcaccatgttggccaggctggtctcaaactcctgacctcaagtgatctgcctgtctcagcttcccaaagtgttgggattacaggtgtgagccactgcacccagcctcttacttgcactttaaaaccctgcctgcgacaccacccatcaaaagaaaaagatggacgctatttaaggtggttggacattgttttcatggaggctacatggagctacgggccctagtcaatgtcatgtctgagcctttgttgaacaccaactgtacattaacctgtgttggttatggctcacagtgttctacaagatcttcatacaagtcagtatcttccaaagcagagagtaatgtctacacacaaatttacccagtattccaggagccacatctacactcaaatagagaattgaaagtggagcccaaggctgggcacagtggctcacgcccgtaatcccagcactttgagagcctgaggcgggtggatcacttgaggtcaggagttcgagaccagcctggccaatacggtgaaacccattctctactaaaaatacaaaaattagccaggcgtggtggtgtgcgcctgtagctccagctacttgggaggctgaggcagaagaatcacttgaacccaggaagcagaggttgcagtgagctgagatcacaccactgaactccagcctgggtgacagagtgagactctgtctaaaaaaaacacaaaacaaaacaaacaaacaaaacaaagacagtggatcacaaatcttgcgttcctaaatgcaaccctcccttcctgaattaactaagccatcttagcaactatatcctctgtgggttttacctgtttggacacagggacatgtgcccagagtcaaagttaaacaggttgggatcatggccccaatttttttttttttttttgagacagggtctcaccctgtcactcaggctggagtgcagcggcacgatctccgcttactgcaatccccacctcccgggctcaagcaatcctcctgcctcagcctcctgagtagctaggactacaggcgtgcaccacatgcccagctatatgggccagatttccatctcagctctgttagtctctagctagatcacactttctctccaagtctcagtttccacatctcccaaattggtataatcatctctgagcctgtgatggttaaatgagataatatatttaaaaaacttaacaatgttgcacagtcagtaaatagtgacaattaccgtgttgcttttttttttcatcatcagggagaaatgcaaagagtgctgaccaggtgacgggctaggtgcccagccctgtgctaggtgctctgaggactgagagatggaaaccacagggctctgcctcagggaaattacatttgctcttgtacacgagaaataggaaacactaggtggtatccattattgccacagcagctcagcgagaagggatgtgagttgagccttgacttgcaaggagagttaggataggcagagagaggacattccaggtgtaggaactgcataggcagagggctgggggcagcctctgggaggtggaagggagaagtgtctctggaggtgaagatgtggggagggtcagagagctacggccagaacacgaggagccccggggactgcccctcagaaggtgctctcataacagccaacatgtggcccactctgccaccattaggagcctagcttgtccaactggtccagcctccactgagcagtcaggtcctgctggcctctctttctactttcccagccccagggaccactctctgtgcgaaggttttccctgatggggccagaccaaccccgcctttcacccgtatgactcagtcatcaggcagatacccccaccactgctcagggtcatgaacacccatgcccggctctggctggctcgactggcttgctcatgcccacataggagggcatgccgggagcatgaaggaattcaggagttggcagatttacacagtcagaacgcactaatatcttttgaccagcttaagaataaatatggcccaacaaattgtcgtttttatgggtatttacagccaaggcactttgtaaacccaagaactagtatttcccagaggaaatctggctctcgattcttgataaattattggaaagtcagaccagccccagctcaggggtttctctctcttattagtggttccagaggtgtggcctgagccagaattaggcttgtctgggctgaagtctctgaagggggtgagcagcccccaggcacctaatgatgataccaatagtaataatcacaagcatgtgcctagcaattacttggtcccgggacactctttcaaacccttcccaagtattaactcatttaatcatcaaaacagccttacagcgtaggtactattattattcccattttatagatgaggaaacggaggcacagaggattccagtaagattcaggaatttctccagggtaaaagggaatccaacccgggtaatactcggaatgctttctgttgcaagtttaaaagctcaaatgaaactaacatttaagcaaaaacaacaatgtattagctcatgcacataaaaagtgcacgggggtagcggggaggggggcaggagctcctccacctgtgtcatcagtttcctaatatttcccagttcctgatcctttgctcctcggtcatcctcacaaggtgctcctttctcgcaggggacccagactttaaaacgcaacccatgcaaatgaagcaagaaggcagaagtcaagcccctggactcggctgttttcattggtcagattagatcacatgcactctagccatgacccactcagagaggccagagaatgccgtttgctgattggctgagcgtgggagcgaggaccccgctttgttcaaggctgggctggacctggcactgtgctccacctgcgaagtccccctccctgggtcaaaggacccagagtgcagtcaccaccccaggggcctgccaccctcctggcagttcagttaccctccagtgcagggatgctgtgcctcttccccaggtcagagaccaacagtaggccctgcttcagtttcctcatcctctagaatcaaggaggacccacgactgcctccagttcacccttgaggcttctggggctttcctgaggctgagttgccctcagcggccagactacctgcagggagtttgcaggcgctggggcccgagtttgcaggtgcggggcccagggtcctccctcagtttcacacctgcctggccctgggaccttgcaccaagaagtcatttccatggcagaatgcatcttacatcaacgtgtaccgggttttacttcttgtattctctcaaatctgatactgtcaaacatctgctttacaaatcatgacacactgtgtcactcaagcccagttgccacccggggcagggagagtcaagacaagtgcagcagccaagaggagacagcagtggcgaggctgtgtccccagatcaagctttgcctgcaggcggcttagcggatttgatgagaaacagtcctaggctccacattctgccggttcactgtgtcccagtcatgaggtccagatgcttcaggcactgggtcccccaagcccaccggtgtgtgtctttataatctctgctggacagccctgcagcgcactgcccgccatgctggctgcacagaacaggcatctccatccctcttcagtgttgctcaagagaataacattccaacacaaacatccaaactcaacaaacatacttttttgacagcttgaacatttttttaaaaagccaacaaatgttgcatcaaagcaaagccctctccccactgtgctcacagtgtggggactccccctgtcgctggtggaggccatgggagcctcaggcctctgagtccctcccctcccgttggcagcccccacgggcctgagtcctggggggatgacacagagtagggaaggtcccaatgctggagctctccctgctgcaagtgagaggcagagatggctgggttgggggcaagggctcatcaggatcctgggatgggtactgaagtgacccaggtgacatccacaggtccgggggactgactggatgtgggggatgagggtggaatcaagatgctgcctgggaccaggcatggtggttcacacctctaacccaagcactttgggaggctgaggtgggagggttgcttgaggccaggagttcgaggctagcctgggcaacatggggagatcacatctgtacaagaaatataaaaattagccgggcagcatgcccttgtagtcccagttactccacaggcagaggcaggagggttgcttgagcctggaatgtcgaggctgcagtgagccatcatcataccactgcactccagcttatgtcacaaagtaagacactgactcaaaaaattaagaattagacaggtgcagtggctcatgcctataataccaacactttgggagctgagatgggaggatccatcacttgaggccaggagttcgagaccagcctggtcaacatagtgagacacccccatctctaataataataataattcttaaaaattaaaaattaggctgggtgcggtggctcacacctgtaatcctagtactttggaaggctgaggtgggcggatcacttgaggtcaggagttcgagactaacctggccaacatggtgaaacccccccatctctactaaaaatacaaaaattatctgggtgtagtagtgtgtgcctgtaatcccagctacttgggaggctgaggcaggagaatcgcttgaacctgggaggcggagcttgcagtgagctgagatcgcgacaccgcactccagcctgggggacaagaggaaaactctgtctcaaaaaggaaaaaaaattaaaaatcaaataaaggatgctgcttgggttctggggacagaaacatgacaggagtgaattcacaagaagagggcccaatccctcctgctgctgaggacacatggagggcccaccccatgttcaggataggctgaggtcctaccagaggcaccgggatgtgctgagcagctcccgatggtggggctccctctctgaacacctggaaggacattcctcacctgggtcctgaacctggaactggcttcaggggattcagagactccatcaagaaggcctgaaggtgtgcactccactccatacttcctgctctcatctcaccagcaaggcccagaactctgagcgggcctcccgggctgctcagctatcagtaaaggagttagttcccggtgcccatgtgctctgtaccccactgcataggggagagggcaggcgccaggcatccttccatccttgtccttgatgtcactttaacaccatgggaaccttgacatccttcacacatccttctatagacagtgctggggcttcagctgtgtttgggggagcacagagaggagacagggtgtgtctgtttgtttgtttttgagacagagtctcgctctgtcgcccaggctggagtgcagtggcacgatctcagctgggatctgcctcccaggttctaccaattctcccgcgtcagcctctcaagtagctgggattacaggtgcccaccaccacgcccagatttttgtattttcagtagagatggggtttcaccatgttggccaggctagtcttgaactcctgacctcaggtgatccacccgcctcggcctcccaaagtactgggattacaggcatgagccgccatgcctggcctaccagattttaaaataatgattctgaccaggcacggtggcttatgcttgtaatcccagcactttggaagaccgaagcgggcagatcacttgaggtcaagagtttgagaccagcttggccaaaatggtgaaaccccgtttctactaaaaatacaaaaaattagccaggcgtagtgatgtgcatctgtaatctcagctctcaggagactgaggcaggagaatcacttgaacccaggaggtagaggttgtggtgagccgagatcatgccactgcactccaggactggggtcggagcaagactccgtctcaaaaaaatgaataaataaaataaaataaaataatgaatttgaaatccaaggcaggggtgaccatataattgctcatccaaaccaggacacttccaagggcgaaagggcaacaggcatgagccagaatgctccagggcaaaccataatgcatgttcattctgtcccaaggtgacttgtgagggttccttttggcttaagtgtcattataaagtcacagctttgagcatatttcctttgtttcagttcgttgtagccattcttcttactaatatttaaattgtgccatctttggcctgtaggaaaatcaacactttgaatcacctatcctcatcctaagaccgtgaagtcacagtcctgatgcgctactcttttctgagtgcatgtgcgcacctcttggaactgttaaaataagcagcgttcatccttgcccttccaaagtgtcctgggcaccggtggaggccatgcagtgcctgggggacgtgctgaaggagccaggggcatcagtaaagacaggagaccacttagagatggcccaggggactgcaaagaccccatgggcagtcaggaaggaggaagccatttacgctggtacctggcaggctgctggcgggggatgcacttgtgctgtgtttggaagctctttgaactgatcaaagctgggccacaccacgagggagctggatgcccccacgggctccctggagctatgggtatgcatgtagacagggcagccatccagcagccttcctcaggccagcccctccccacaagggaatgtgacaaccgcccccccgcacagcctgggcccccttcgtgaccacctgctgggtacctggcaccccagaatgccctgttctaatggccctggacggtgtacccctaggtcagtggttctgaaagcaggggaggcgattttgcaccctggaagacatttggcaaggtctggagacatttctggtttttacagcagggggtacaagctaaggaggctgctgaatagcctacgatgcacaggatggcctcataataaacagcgatggggcccaaaatgtcaatggggctgaggttgaaaagccctgccctaggccccaggggtggcagaggggctgtgtgtgtgggaggtagggacagagcctggacacgcagcctgcggtgtcctcccacataaggggcaattctgggtagtgtgtggaaggcaagtggagaggccagggctgctgtgttccacactggaactcccagagcctgagatttccaaaattaaacctggccttctaggtctttttgaagttatattggttagggcaggggaaaagaacatattttatttaagcatttgttggcttgatttgtaactgttagatacgtagatataggttatgtgggctgagcgtggtggctcacacctgtaatcctagcactttgggaggccgaggcaggagaattgcttaagctcacaagtttgagaccagtttgggcaatacagcaaagccctgtctctacaaaaaatacaaaaattagccgggcatgatggcactcgtctgtggtcccagctacttgggaggctgaggcgggagaatcgcttgagcctgggaggtgaaggttgcagtgagctgagattataccattgcactccagcctgggtgacagagtgagaccctgtgtcaaatttttttaaaaaggatatgtgggtcaggtgtggtggctcatgcctgtaatcccagcactttgggaggctgagacaggcagatcacttgaggtcaggagtttgagaccagcctggccaacatggcaaaaccttgtctctactaataatacaaaaattagctgagtgtggtggtgcacacctgtaatcccagctactgcggaggctgaggcaggagaatcgcttgaacccaggaggcagaggttgcagtgagccgagatggcaccactacactccagcttgggcgacagagtgagactctttcaaaaaaaaaaaaaatgtggcctctgcttatcgctttgcctcaggtggggacctaggaaacactcgtgcacaatctgtgctcagacagagacccaggagggaggcatggaggctgcaaggagcccatgagtcctgcaggaaggggcctggctgggatggttgttagattccacccaggcattccccactcatgcagatatctgcagaaccccagctgtgtgcaggcaactggctgagtgccggggatgctcaccctctaagacaagaggacaagaaaccaccaatgatgaaagagacagtggtgtgctacgagatccccaggctggggctcagggctctggggcaaatactccatggagttcccggctgccttcttcctgggtccttaccttgggtcatgtgggtcttcacacgtcccctccccccgaccaccacacttgtgcctgcagttgaattctccttttcagagcatctgggcactgccaggaccaccctagggaggggtgtccactggaatctgagtccagagccaccatgcagggacctctgagatcaccaatgcacccatttcacagattagaaaactgagacatctcaacttgtacaaggccatgcagggagggatggtagggtctggctagtgggttaaccagctcccatggcactctgccacctgccagatgcccttcccaccgggctgctcccgggacttcggtggggagggctttcacacatgtcagcattcttgaatcccagaggtctcctcctggttctgatgtactggactaaagaagaggccaggtgcagcagctcacactgtaatctcagcactttgggaggtcaaggtaggaggatggcttgagcccaggagtttgagaccagcttggtcaacatagtgaaacctcacctctccaaaaaataaaaaaaaaattagccaggtgtggtggtgcgtgcctgcagttccatctactcgggaggctgagcttgagcccaggaggtcaaggctgcagcgagctgagatcaggccactgcacccaccccagcctgggcaacagagcgtgaccctgtcttaaaaaaacaaaaaaagttgccattgtggtccccctttctccagcctggcctgtgctgtgtgagggatggccctaaccctcagagggaatggaaacttcgttcctcggtgggcagcgctggtaaccatgagtaagaggaggaagtgtccgggcctgacagggtccagggcccagctctcctgcccaagggcaagactggctgcgtggccgccactggccagcagagggcgcggcctgaggcgcccaaggagggcagcaggaggcaggcggcggggctgtcccgctccgagagcggcgggaagcgccagccaggccggccctcccttccctccggacagcccggaaccccgccacacacctatggctgatgggtgctgtcacttctgtttgctatgctttctgccatcactattgttatgttaaactcccctgactaggtctccactttctgtcccattttgcacattttgcattttgttttgttttgttttgtttatttgagacggagtctcgctctgtcgcccaggctggagtgcagtggcgcgatctgggctccctgcaacctccacctgccggattcaagtgatcctcctgcctcagcctccctagtagctgggattacaggttacccctgcccagctaatttttgtatttttggtagagacggggtttccctatgttggccaagctggtctcgaactcctgggtccttaccttgggtcacctgggtcttcacacgcccccaccccccgaccaccacacttgtgcctgcagttgaattctccttttcagagcacctgggcactgccaggaccatcctaggaaggggtgtccactggaatctgagtccagagccaccatgcagggacctctgaaatcaccaatgcacccatttcacagattaggaaactgagacatcttaacttgtacagctaatttttgtatttttggtagagacggggtttcgctatgttggccaagctggtctcgaactcctggcctcacttgatctgggccccgccccccctcctcggcctcccaaagtgctgggattacaggtgtaagccactttgtaaaaataaaaattagatccctcacacagagtccagggagggagagttccgtgggctgggagctgagaggtggggagatgggctctctgcacccacacttccctgctgtgtggccccaggcaggttacttcatctctctgtgccttggtttcacctcctcctgtaagatgcggcactgggactgcctctcaggagagtcccgcagagcagtctggggaggtgcttggcatggctgccggcacctgctcaccgtcatcacacggggacttagtcttaagaaaaggggactggaggtcgggcacggtggctcacacctataatcccagcactttgggaggcggaggcaggtggatcacctgaggtcaggagtttgagaccaacctggccaacatggtgaaacctgtctctcctaaaaatacaaaaattagctgggtgtggtggtgcatgcctgtaatcccagctactcaggaggctgaagctgtagaatcgcttgaacccaggaggcagaggttgcaatgagccgagatccagctactgcacttcaggctgggcaacagaccgagactctatctcaaggaaaaaaaaaaaaagaaagaaagaaaagaaaggaaaaaagaaaaggggattggaagcttacagccggaaggggaggcacaggctgggtgaagtgggccaggtgtcaccaggagacagggcaagggcttcagagcgggagatggggctgcgcttcagaaccctgggctctcttgggcagtgggggcctcacaccacaatccccagcactggccccaaacaggcggcttctatttctttctgcttttttagagaaggaaaactcatcctgcttcagtatgcagcagccaataaaaacacgttaatctttaacgtgttagcaaaacagcctccaatttgaatatcggctcttcctcccatctgtggcagtttgcacagatttttttttagagtggcagaatgcctcatctatgcaccagccggtggcaggcgccattcactgccacagagcctcccccagggccgtgaagggcccccatcccagaccatggcatggagtcccggcagaggggctcatctaagctctaccttagcacaagagggccccagatttgaggattttgcagatcagtaaaattacacccaaaccaactgggaaggaacatagggataccagctcatgattttgcccaggaaagccatttgagagaaaaaatagatggtcatccaagaacctcttcaattcactggagaaataaaattttgacatcaaaagggggaggcagacagaatgaaagaataacaggtcttcaaactgagcaaatttagggagacctaccgtgttgactttatttttatcatttggacgtttaaaataaccctgggggggtcaggcatggtggctcacacctgtagtccccacactttgggaggccaaggtgggaggatcacttgaggccaggagttcaagaccagcctgagcaacatagcaagaccccccccccccgtctctaaaagaaatttttatttattcatttttaattaatttattttattattagttgtttttttctggagacacagtttcaccctgtcgcccaggctggagttcaatggcatcatctcagctcactgcaacctccttctcccgggttcaaataattcttgtgcctcagcctcatgagtagctgggattacaggtgcccgccaccacgcctggctaatttttgtatttttagtagagatggggttggccaggctggtcttgaactcctggcctcagatgatctgcctgcctcagcctcccaaagtgctgggattacaggcgtgagccaccgtgcctggcctctaaaagaaatttttagattaaaaaaagaagaagaagaagaaagccctggggaatctgcagacctacccaagggggacagtgagtttagtatgctaggagtgcccagctagatccccagcccgagctattctgggctcgcctgcccccagcctgctgccccctcaagagaaccgtgaccagaaacttagtccttgggaaatatgcgctactgcagaacttgtcaaatggcaaagaatcaaggaaggaataaatagcaatattttataagttttaaaatgctattttaacacaaataccagagcaactatagcataaatcaacagagacacccaaaagtatgtttgtacaagaaatgtaataagctggtatgaaaaacagtgtcaactggtacagatggcagaaaaagccaatattcaaatgtatgctgttttactaacacattaaagatcaacattttggtacctgctgctcacgatagcaggattaaaaaaacacacaacacacacatatcctcacgcgtgatattctaacccagagaatgcaagattcttaaagaaattgtcaagcactttctatacttcatctggtggttttaaagcttccgtggttcagaggaaaatttgcatctgaaaatgcggcttttcccctagctgcctgatgttggagaaaattagaaaagcaggatgagaaaatatcagggttgtagtccttagaagtctccttccagattagtaatgggaacagaattatcccaagtgaatgactctggtggtgcctctcctctctgagtacaggacaggctatttttgtttgtttgtttgtttgtttgtttgtttttgagacagagtttcactctgtcacccaggctggagttcagtggcgcgatcttggctcaccgcaacctctgcctgtcaggttcaagcgattctcctgcctcagccacctgagtagctgagattacaggcgtgcgccaccacacctgcctaattttgtatttttttagtggagacgggatttcaccatgttggccaggctggtctcaaactcccgacctcaagtgatccacccatttcggcctcccaaagtgctaagattacacgcatgaaccatcatgccctgccagcacgggctatttttaagatgctttcaggcattgcagctctgggggcccaaaagagccctctgaggtgtgcaggccagggagcactacccgtacactacaaatgggcaaactgaggctcagacgtggtgtacagctgaccagagatcacagggcctaaaggaagcgtgatgggcgtgcagaccaggcacacaattgagcaaaaagcccccaggaaactctcaactgcctcttgtggtgtcacctcgtaagcccatgggcctgggaattgggcagcccgagttccaatcttcactcccaccaggcccgaccttaggcaagtgacctcacctctgagcccctactgagacacaagatcgacaaaaacctccccacagcgctggcatgaggatcgaaggagatgcagtgggtgagcgtggccagtgtgcatggcaactgtgatgtcatgctctgtccagaacagagacagccagccgcagatgctttacttggcttacctagtgtttttaaaagtcttttgatttgagatgaagtcccattctgttgcccaggctggagggcagaggcaagatctcggctcactgcaacctccagtttctgtctcaaataaacaaaacaaaacaaaatgcaaaatgtgcaaaatgggacagaaagtggagacctgcctcagcctcccaagtagctggaattacaggcacgcgccaccacacctggctaatttttgtatttttagtagagatagggtttcacaatgttgtccaggctggtctcaaactcctgacctcaagtgattcacccgcctcagcctcccaaagtgctgggataacaggcgtgagccaccacgccagcctttgtaaagtcttgattaaagccgggcatggtggcccatgcctgtcatcccagcaccttgggaggcaggaggattccttgagcccaagagtttgagatcagcctaggcaacagagtgaggccccatctctacaaaaaataaacaatattagctgggcgtggtggcacacacctgtagtcctagctacttgggaactgaagtgggaggattgcttgagcccaggagtttgaggctgcagtgagctatgatcatgccagtgcaccccagcctgggtgacagagatcctgtctctaaaaaaagtaagatacccatgcaaggaagtagtatgtggcagtgaagaagagtggggtacacctatctgtacaacgtaactgttgggctggaagagaatgccatgcacgttccaacaccttatttttgttttttaggaaagccaccccacaaagtcatactccaatcacatgggcagtggctcacaaccaggagcaattctgccccccagggcacatgtgacaatgtctggagacatttttgattgtcacacccaggtagggggtgctagttgtgtgtctggtgggtaagaagccagggctgtggctgaacgtcctgtaatcatgggatggcccccacaacacagagaagtccagccccatggccaggcgcgatggctcacacgtgtaatcccagcactttgggaggccgaggcaggtggatcacctgaggtcaggggtttgagaccagcctggccaatatggtgaaaccccatctctattaataatacaaaaattagccaggtatgttggcgggcacctgtaatcccagctactcaggaggctgaggcaggagaatcacttgaacccgggaggcgaaggttgcagtgagctgagatcatgccattgtactccagcctgggtgaaaagagcgaaactcagtctcctcaaaaaaaaaaaaaaaacacacacacagagaagtccagccccaaatgctaaccgtgccaaggctgagaaaccttgctccaaatgcaggacaatatctggaaggcaacaagtccagttgatgacagaggctacctctgcggagggtactgggtgatgctgatcaaagagaactttaaacccatgggtaatgtctttactttctggaagaatacatttgtgtgctgttgaattggtaaaatcaccaaggatagaaggaaggagagagggtcagagtggaccactgtagacttggccctgccccacatcttcagggcagcagagggtttgggaggggtgggagccccagggctcatgtagtcactgctgtcctcacacacccgcctggagggtccctcctccctgcagtgacactccctggagtctctgtgactgctctcacagacaccggcagcagattaggttttcacctttccctaatgaatgtgacttttagcaactgtgccgagtgtttttttaaaacagcctctttcaccaaagcatcattaccagcaaatttgttacagcttccagaccaactccatcaaatcacctgcagcccatggtttctccttctccttttcctcctcctccttcttccttcttctttttttgagacaaagtttcactcttgttgcccagtctggagtgcaatggcgcaatctcagctcactgcaacctctgccctctgctgcctcccaggttcaagcaattctcctgcctcacgtagctgggatgcccagctaactttttgtgtttttagtagagatgggatttcaccatgttggccaggctggtcttgaactcctgacctcaggtgatccaccctcctaggcctcccaaagtgctgggattacaggcgtgagccaccatgcctggcctgcacctccatcttcacgggcctggacagaattctccaattaactgagacctggtgacatttgtggtactatgcgatgctcacagcacagatgcacgctccctcttctgattccagcaggcaccaagacccaggcccagggagggccagtatgcgtcagcattgcctgtgcaccctggtgacacctggacctccttctaccaaacaaagacactgcagtaaggtggaagcctcctttgacccctctccaagagacgaccactatcacccagtatgagtaatcactattgcccagcccaggtagctggggtcactaccagacttgtatcctaaattttatacagatgatagatagatagatagatagatagatagatagatagatagatagatagacagacagatagatagacagatgatagatagataattgatagaggtagatgctggatatgatagattataggtagaaagagacggataggtggatagctgattgataaataagagatatgatagataaatagattataaatagagattatttagagagatggatagacagatgactgatggatagaggcatagatacataatacatttacagccacacacattttactgtcgtctggggctttggtgcccccatacctggtactgaatcacacatgttcttccttttcttgccttttcccccaaggcgctcactggagctctttctttgcccattacattctactaataccctcatgtcctaaagcaaggaggcagcagggatgggggctgacgtggcctcccgtactcaccagacatggctgtgtcagccagcagtggggacaccccttggccataattcagctgcccagaggggatgactttccgggatccacacgggtgctgaaggggctggtggagatgacagctggctgatcccaaggacaagcagggactgcactgggacttaaactcttaggggtgtttccggttgttcgtggtgcacaattccaccacgagcagccttgtccttgcttccttgggaagctgcgtctccaggtgggagctctctgagccacctggagcagtcacaatcagagaccagacctatttatttacttatgtttttgagacagggtcttgctctgttgctcaggctggagtgcagtggtgtgatcatagctcactgcagcctcgctctcctgagccaagggatcatcctttctcagcctcccaagtagctgggactacaggtgtgcaccaccatacctggctatatctttttttgtaaagatgaggtttcgctgtgttgcccaggctggtcttgaactcccgcctcagcctccaacgtgctgggattataggtgtgagccaccacgcccagactaactggatcttctttgagcctcccccaccctgtggggagggcagcctggggattataattcataaatgacagaatcgggtcctgggcccagatgaacctttcctgaggtcccctggtgagtgagtgaccaaagagctggccctgatgctctgggaaaacgcctggggccaaggacagcctctgagcagcagccgggccctcctttccaccacagtttccagccagagaccctgcatgcttctgcgcatggccacacccgacccagtgggccctttcactgcccaaggccgatgccgcccatccgtccaccacccgtgtcacactcactggacacataattcctgagtccctacaatgcacaggtgctgttctaggcaatggggagagagcagtgaatgaaatagtctggatccctgaatccagggagctggacttctaggtgcagggaggccaatgggtcctatgaagacagcaaaacaagtgacgtgatgcacagggaggggagagaaaggcttagtggagagtgacgcctctgcacatggagaagagagcagtcatgtacacatctggaggaagggagttccaggcagggaacagcatgtggaaaggcctggagtcaggaagtgctcagctgggaatggcctgaaaggccagtggctgaggtgccctgagggagaggaccatcccgaggagcatcctgagctctcccaggcttgggaaaatctcccttcctctccctgctctgttattccaattccccaggacgccagaaactcagacacctttgtgcaagggcctccctgagcaggagcccggccggaaagtgtcagggtgacagtgactcccagtgccgcctcttcagggccatcctgtggcctcctccagctggacccacgaagcccacttcaccctcagtctccagaagtgtccaagctctgggggctccacttggcccagagaggtctggccccactcctcacccccaccaatcttctctgggcccctttgacagaatatggggccactgctctgaaaacacaacagtgacaacagaaagtctgtgatcagggccccaaactgctgcccccaaagtggccttgaccagaccacttacatgaccattcctaaggagcggggtggctggtgggtgagccaggtgttgtgctgggtcccacctctgccaccaactccctgtgcaccctcaagccagccacctccctctccagcctcagtttcctcctgggtatggggaaggacataacaatattaacaccccccagggtgcacttgtgagctccttagggcaaatccagaatcccaggcccccgtgctctacacaaaccatctctgagacaagggagggcctgcttcataccctgtttcactccccaccaaaaatccccttgactcctctggatttaaattcctcccccaggagctcaaaccgagtcaaggctgcaaataatctgctttatttatttatttatttatttttgagacggagtctcactctgtcacccaggcaggagggccgtggtgtgatctcagctcactgcaacctccgcctcccaggtttcagcgattctcctgcctcagcctcctgaacagctgggatacaggcgtgtgccaccacctccagctaatttttttttgtaattttagtagagatggagttttgccatgttggccaggcttgtctcgaactcctgacctcaggtattctgcctgccttagcctcccaaagtgctgggattacagccttgcaccaccatacctggctaatttttgtgtttttagtagagacagggtttccccatgttgaccaggctgatctcgaactgacctcaagtgatccgcccgccttggcctcccaaagtactgggattacaggaatgagccaccatgcccggcctaagaaggcgaaatttggacccacacaggcaccagggctgtgcacgcagagagcaggccatgtgaggacaaggtgagcaggtggttgctggagcctaggacagtggcctcgggggaaagggaacctgctggcgccttgatgctggacctccagcctccagcttctgctgttcaatctacacaacccccatggacacatacaccagccccaacactgacttcatgtacacacccccacacacactgaccccagactcccactgacccttacacatgccccccacacccatgccctgccttattttaacctggagtgcaacggcacgatctcgccttactgcaacctccccctccagggttcaagtgattctcctacctcagcctcccgagtagctaggattataggcatgcgccaccacgcccggctaattttgtatttttagtggagacagggtttctccatgttggtcaggctggtctcgaactcccgacctcaggtgatccacctgcctcagcctcccaaagtgttgagattacgggtgtgagccactgcgccctgccacagtccatattcttgattatttatagttggatcaattcccttgtcacaacttaatcaatgtatcgaatatgccatcattcgtcaaataggaaccaagctaagatcccttcaagtaatcaaccgtgatttgttatcctgcagggttgctcataccaagagtgcagttcatgaccacgcttcctgcacacgtttcgctgaaggagtggttccatggtggatgtggctatttagattaaaacaaacacccagttagtaccatcaccacgggcacaagattgtatgactgcttttcaaaaagcactagtgatgtggttatagtcaataatggtttgtatcactttttggcttttttttgaaacaaggtcttgctctgttgcccaggctggagtgcagtggtgtgatcatagctcactgcaacctcaacttcctgcgctcaagcgatcctcctgtctcagcctcccaagtggctgtgactacaggtgtgtgcccactcgcctagctaatttatttttattttttgtagagacgaggtctcactatgttgtccaggttggtctcaaactcctgggctcaagcaattctcccacctcagcctcttgagtagctgggactacaggcgcacaccaccatgcctggctttttatttttatttttagtttttgtagggatctcaccatgttgaccaggttggtctccgactcttgggctcaagtggtcctcccgccttggcctcccaagttgcagcaattacaaggcgtgatcccctgtgccttgccaattttccattttagtggatcctgctcacttgggtttctatggcagtcatagcttcactcagttaagattgaggcatgccctgcctcctacctggaccccatggaaggcctccgggatgagacttgtgggttgaagtgtgtcctccagaaagacatatggaagtcctgacccccagtacctgtgactgtggccttatgtggaaatagcgtctttgcagatgtaatcaagatgcagtggggtcatacttgattagggtgctttctaaatccaatgaccggtggattggattgaggggaattatagttcgatcaactcctatggagagggggatttggttagagacacagagacacgcaaacagggaagaaggccttgtgaagacagaggcagaaagtggaatgacgcagctacagcagaggaaggccagggatccccggagccaccagaagctggaggaggagaggagggattcctccctggagcctccagggggagcacgaccctgccggcaccttgatttcgggctcagcctccagaagcatgggagaacaaatatctgctgttttaaagccaccacgtctgtgacaatttgttacggtgaccacaggaaaataatccagggactgcatctagaatttaccatgtgcctcatgccactatcactggcacaggctgaagcctttctcctttttcctctggagaagaccatcttctcctccagtagtctaagcagttctcagcccagggattccagcaagtgtctcaaagccacacactcggagagacgacggccacatgacctggctcagcaggtggctctgctgcctttcacaggagtttgcctctctgttcagggtgccacacagggacagccttggggcagacactctgctgtttattattattattattattgagacatagtctcactctatcacccaggctagagggcagtggcatgatctcggctcactgcaacctccgcctcctgggttcaagcaagtctcctgcctcagcctcccgaggagctgggattacaggtgtgcaccaccacgtccactaatttttgtatttttagcagagacggggttttgccatgttggccaggctagtctcgaactcctggcctcaagtgatccacccgcctcagcctcctaaagtgctgagattacaggagtgagccactgtgccgagcctagctgtttattattattacattttttaagagataggatcttgctatgctgctcagactggtctcaaactcctgggctcaagtgatcctcctaccttggcctcccaaagtgctggcataacaggcatgagccaccgtgcccaggcagccttgctaagcacaccttgcactcctgctgcactactcctgtgtgaggccatggagacatctgctacattgtagatactattggatacttttcaagtatcacacagcctacaatttccaacagtgcactccattcagctcccatgggacggatgagtgtcacagggcagctccacacgcagatcagggagagggtggatatcacccccatcttcctgtggctctgagaaaaggggtgggtgcccggcgtcagggcagctgacttcacccaggaggggccacctgcccagttactcgggcctccacttccctgcactcagggcactttgttggaagagggcttgtctggccatgaatggcctgaaagctgcgagaatggcttaacacacctgaagaagggacatgtatatgctgggggctggcactctcccacattagctcttttgcaccattgtcatggggatcttggggctcagagaggaaagtgacctgcatgagctcatgcagaggcatgtggcaggaccatcgcttgaacctggcactggagggccctgggctcagcacctcgggcacctagagtgagggcatccccaaggtccatgtgacccagagcacggctccggccactccctcccggaaatggatcggtgaacagagaggctgaggacctcttgcaatgctgcccagactgcatggagaagcccgtggagacatctgctacgttgtagatactactggacatttttctttttttttcttttcttttttttttttttttgagatggagtctcgctctgtcacccaggctagagtgcagtggagcgatctcggctcactgcaagctctgcttcccgggttcacgccattctcctgcctcagcctcccgagtagctgggactacaggcgcccgccaccacacccggctaatttttttttttgtatttttagtagagatggggtttcaccgtgttagccaggatggtctcgatctcctgacctcgtgatccacccatctcggcctcccaaagtgctgggattacaggcgtaagccaccgcacccggcctactactggacatttttcaagtatcacacagcctataatttccaacagtgcattccattcagctcccatggggcggatgggtgtcacagggcagccccacatgcagatcatggagagggtggatatcatcccatcttcctgtggctctgagaagcttcagaagcctcagaagcaccccctgtagcgccagagagctcagacagcttgagggcctgcagcccagccagcccctgccccacaggccaggctccagcctggcccttgcaggggtgtgctgtttccaatgggtgccatgctgtgcacatccacggggcaggagggaaagctgggggttgccatgggctgcctgggttggaggggagctgggattctatggtcaccctctttcacatcttctgacgcatcctctctctggaccctcaggcagtccctgtcctcagataagccccgctcactgagacggtgatgcttaactcaggtatgtgtctaatgacagggtcttgcagaagggaccagcctgagggactaggactgcctcacctttgcaagtcctcaattgtccaaggctggcctcctggaatgggaaggaagcaaggtcccccgaggcattcatacccttatttctcacaaaaaaaaaagtcaagtctcttgttccatcgggtgccctctgggaccaagtgactgtctcaggggcagggtgagacagtttaaatgatcatggcctctgcctgacccatgtggctgaagtgagggaggggtggcttccccaagcatccatatgtgtggggggtgctgtttccagaaggacggtgggggtcccaggccgagcttaggagttcactgcagcctcaagaggaagggcttggggaggtggcatttgcatgggctttgaagaataggcaccacctgcatgcacagagagagaggagcaccatagcgagaaggaatggtgcagacacaggccctgcggtacttttgggtagggggtgtaacagagtgcggctgctgtgtggggagtgtgctctggggttcagaacaccagaaccatgtccctgccagctggcaaggtgccctcaggaaaaggtgcccttctggcctgctacagtccccaaaaggtacacagtatggtaaatggagcacagaatggcttatggccagacgctcttgtgcagtgcacaacatgcacaactgtgtgtagtggcctgaccaggatatcaacactggactgggaagacatggcgcctcctctctgggctgaatagtgtgtgtgtgtgtgtgtgtgtgtgtgtgtgtgtgtgtgtgtgtatgtgtgtgtacaccccacagtgcttcactgggatccagcctccagcagcaacaagacacaaatggaacaagggtgactgcccccagctgacaggtgagaggttgagagccagcagccagctctgcaagcctgctgcacgctcaggagcgagcactcctccaagcaggcacctcccagagcaacaggaagcaattcatcagcagctgaggccctgctcccaggccctgcagcctgtggggactctgcagcccaatggacaggcctccgatccccccacccctagcccacaaagaggccagaggcagcgccacgcgccaattacaggagccaattaattcacacttaacaggggtattttcttttactgcgcagaaccgaggggcataaaaccctgattcgtcttctgtggctgggtttgctctctgcgtgctcatatcctttaatcactcctgccacagaccaggggccaaaccctcgccagcgaggggagccacgcgggcgattccccattaacaatctggtggggaggccacgccggctgtgctgtttacagttccgtttcccctcggctgctcccagaagtttccataaaaacagatgtaaggtaatcaaagacttcccagccccgggcctctctgctcctgaaggcttccatggagccggctccctctgctggggtttgtgcttccaaaagactcttaaagcagccctaaaatctctccccagacaggcagactcttctctggcagactctgcaatcatttgtcaagtattttatggtcaataataatagtaataacacctttgctgagcttggtgcctttttcaatgactctcagagccatgccgtgagatcccggtggcatcgcaatggctgatgacaggtgtcttattcccattttgcagatggaaaggagaaggcagtttggggaagaaaccagcctcagcaccatctcccctgggtctaacattccaggagaaaggtgggcactgtccggctccttggtggcaggcctgctgctggccttgtccctctcttcttattcactgggcctctgtccagggccaaggaacctgaagcccagtgttgggggtagggacgtggccagaacaccaggtggtatggctgggcacggtggctcactcctgtaatcctagcacgttgtgaggccgaggtggagcatcacttgagcccaggagtctgaggctgcagtgagctatgatcgtgcaactgtactctagcctgggccatagagtgagaccctgtctctaaacaaataaataaataggctgggtgtggtggctcacgcctataatcccagcactttgggaggccgaggcaggcggatcacctgaggtcaggagttcgagaccagcctggccaacatggtgaaatcccgcctctagtaaaaatacaaaaattagccgggtatggtggtgggtgcctgtaatctcacctgcttgggaggctgaggcaggagaatcacttgaacccaggaggcggaggttgcagtgagccgagatcatgccacttcactccagcctgagcgaccgagtgactccgtctcaaaaataaacaaacaggatagacagcgtaaaccctgatgaacactagaatttcagacaatcctactgccctgaaggctgggcccaacagacacatttcacagatggaaatcttgggaagggccaaagcaagaacccctggccaccccctggaagacctaagccttaaagcccctggcccataccctctgcacctcaccacattgatgtcagcctaagctgacatcagtggatgaaaaagtgatgaaaaagtgacttttaggctgggcgcggtgggtcatgcctgtaatctcagcactttgggaggctgaggtgcatggatcaccagaggtcagaagttcgagactagcctggccaacaaggtgaaaccctgtctctagtaaaaatgcaaaatttagccgggtgtggtggtgtgcacctgtaatcccagctactcgagaggctgagacaggagaatcactagaacctcagaggtggaggctgcagtgagccatgaaatgcaccactgccctccagcgtgggcgacagagtgagactctgtctcaaaagaaaatttttaaaaaggactttaaaatcaaacagcctagattgcacatgtgtgatattggtgggtctccagcccctgcctccatcctgagaagcatcctttttggggaatttcctgatgggtagagtcttggcaggagggcgatcccccttgcctccctctcactgccctttcacacgacaaagaccagggtgggctccaacctgactctgccactgcctggtctaccacatggcaggggtgagagcagggcccagccaatccgatgcctgcttccagggctgcaggtcttaagccagagatgccaggaggaagggaacctctcctgggaggttgggtttctctggtttatcataactcttgaggctcagagaggaaagtgacctgtgtgagctcacacagaggcatgtggcagggccatcgcttgaagctggcactggaaggccctggactcagcacctcgggcacctacagcgagggcatcacgaatgtccatgtgacccagagcacggctccagccactccctcctggaggcaaaacagagaacagagaggctgagtaccccttggctgcaaggtgtccctgtctcagaagcatcaggggcagccccaaacccccacccccgagttggctcagtcagctccaggacagatctcagaggtcctcactctgcagctcagccagcccttgcctgatgggccccgcgccagtccagcccttgcaaagggaaagccggaacatattttagtgtgagccccttgttgagatgagggctgaccacaggccctgggaattcctgagaagattcctctgggctctttccaatgggaagccctttttgtttgagatggctggagttagttcttgtcacctgcaaccaaaacccagactggcatgacttcaggatcagctgtgcccaggatgatcgtggttaacatgtcagcagcatctgctacacgctagatgccctccacattccttagttagttcccacaagagccctggtattatgtctcccactgcacagccaaggttattgaggcacagagaggttaagaaatgtgtccagtgtcacacagctagcaactccagccatctgtccccagagcctccatacttgaggagtaagctggtcttgcttgagagagcactgtggtttcttggatctaagagtggaagtgggatggaagctctgggtgtgtgctttatggggaggtgcatgaagtgaacccctctgctatgggggtgtgtgggccttggaggaatcctggtcccgggtgaggcaggagtgtgtcttgcttctaggaccactccaggcagggcctccctggatgccgcaagtgcagtgggtctgccctggcccaggccctcatcacagctgagaaagctctgcagggtcactgtgggtgctagaacaggcagctggaatgctgcagtgggggaaacagggaccacaggggtgagctccagttttccactgcttttttcaggggccaactggtgagtccaaggaggagaagccagtgagcagaggggcttcccccagtcccagccaaagcagctcccctgggcctgctttacctcctcaacttccacagaggatcccatttgagcaaaggactctccttagctggcaggaggttaagtctgcagtggctgatggcatctctaccaccactcagggaccacctgccagagaaggaagccacagcagaggagaacagagaccaagaaaggacctgtcaatactatttaagcccctggatccagccaggactgaagtccctggacttgctgatagcaagaaccaatcacttcctaatgttatttcagttgcacttgagctggttgattcatgtttctcttgtttgtctctgaatgggtcttgaggaacatgggtctcataccagaataagttccagcttcccctgtcttaaagagtctgctatggccgggtgcagtggctcacgcctgtaatcccagcactttgggaggctgaggcaggcgtatagcctgaggtcaggagttccagaccaccctggccaacatggtgaaatcccttctctactaaacatacagaaaattagccaggcatggcggctcaggcctgtaattccacctactcaggaagctaaggcaggagaatcacttgaatttaggaggtggaggttgcagtgagctgagcctgggcgacagagtgagactccatctaaaaaaaaaaagaaaaaaaaaaaaaagagctgggagtggtggctcacgcctgtaatcccagcactttgggaggccaagatgggtggatcacctgaggtcgggagtttgagaccagcctgaccaacatggcgaaaccccatctctaataaaaatacaaaaattagccgggcgtggtggggtgcatctgtaatcccagctactcaggagactgaggcaggagaatcgcttgaatccaggaggcggagattgcagtgagccgagagcgcgccactacactccagcctgggcgacagagcgagatttcgtctcaaaaaaaaaagaaaaagaaaaagaagaaagtctgctgctatcatactagacagagaaattccaacacctctggaggggctgcccttccttagtccgattaggagaagaaatggcagctggcactcaaccaccacactcccctgaggctactccaggggcagatgtcaaggaccagaggccaccggttctgcgaggggcagggtggagggtgtgggtggaggtatgaaccaccatgaatctcagaactctgcagtcggggccgcggcagcaccactcttgttctcccagcctgggggtcctctcccaccgcagcacctcctcctgttgttctccacccagcagcctgggggagctgccaacagaagccaaccccatctctccttgctcagaaccagccagcagcttctcgtgcaccttaggtgtgtgtgcctcggccccagcctggcctctccactctcccctctgccctcagctccagcctctctggccttttctctcattgtaggacaagcctggcttgctctgcccaaaacttgcagtgcacgagggctgctggcccctcttcttcctccaggctcagccccaaagtcacctcccccagaccagcccttcctctccctttgcagcaacaacgacctctccctttattacctgcttttccccactggaagggaagacctgggccgggcatagtgggtcatgcccataatcccaacactttgggaggccgagatgggcagatcacctgaggtcaggagtttgagaccagcctagccaacatggtgaaaccccatctctagtaaaaatacaaaaattatccaggtgtggtggtgggtgcctgtaatcccacctactcaagaggctgaggcaggagaatcacttgaacccaggaggcagaggttgcagtgagccaagattgtgctactgcactccagcctgagcgacagagagagactccatcttaaaaaaaaaaaaaagaaaaaagctgggtatggtgaggagcacctatagttccagctactcaaaaggctgaagcaggaggatcacttgagcccaggagtttgaggctgcagtgagctatgatggtgccagtccactccagccttggtgaaagagtgagaccaaagagagagaaagaaagagagagaaagagaagaccttagcactgctatgaccctggtctgtggaagaggatcctatacagtgtccactcaacaaacacttgtggaatgaatgaatgagggagtgaaggaatgaatgaatgaataataatgggcatggcctctaatgtcttgccaatgaattccctcccctcctggccacccacacctcatctccaccacacaaaactcaccctcttcatccttcttccagaaaatgtccagcacccatgatcgggggcctttcttacttccccaaagtgctctctgctcacgccagaaatcatcccaggaggaccagccccagcccgtcctggctgccccaagtgatgccgggctccagcaggtgctgttccaaggagcggtggcccagcagaatggtgggtttgttgtttttttgtttttttttttttcatatgagggaaaaattagccttccttaccagacaagaatgacaatttacagaaaactatgccttgaattcataatctgtaatgagcggaaatggtattccatagtaatccatcccaactgactcgctattgtacacgcacctgctaacattttttaagctgggactttatggaaaggacattttgattgcttctgaagtttgctgagcaattccccctctctctcaggcatacggtctttgtgctggaaatttccctcgtggctccatgcgcggactggcagacgggcacgtgggcccacacgcgggcagcacacacgcagccgcagccccctcattggcatggctctagtgggggcctctgcaggtgccgggctacagagatggaagcggggagagtggaatcacagttggcacctgtgccgagcttgcctgaggagctgcacactgcggtgcctggcggaatcggagatgctttccagcactggagggcagggacggagcacgggaccgggaaggacaagggcttgggttgggtcgcccctggggccattggggcctggcttgtggcacccgagcaccaggatgtgggaaggctgggtgtgcaaggacaggtctcacgcccaccccctcaaacgcctgggttttgctcatacggaagtcactctaggccccaattggcagccgccccactcagtccccagctcgggcctccagcccagcactgacacaaacaggtggtggacagcttgctctgcatggcccctacagactgagagccccctgaggcaggaccaaggctgccaacgtgcgcctgggccttgcccagctctggcatgcagtaggtgaaggcagtgcctccagtcggagccagggtcctggtggaggctctgcctccaggcagtgggtccggcacactgatactcagcccctgcagcctgtggctccccagggcatgttctcgtggcctcacagacactgaggttcagagatcacggagccgtgagtctttctttccactgcaggacctgttgtggtccacgccatcaggaaagtggtagtcagggcagtctataacccagcaacgacacggggatacgagaagctgggcacgtgacgtccactgaggctgtctctgtgggaacgagtatttaggaacattcaaagtggcaagcagtagggtggtgactcaagaagctgtggaggccgggcgcggtggctcaagtctgtaatcccagcactttgggaggccgaggcgggcagatcatctgaggtcaggagttcaagcccggcctggtcaacatggtgaaacctcgtctctactaaaaatataaaaatcagccgggcgtggtggcaggcacctgtaatcccagctactcaggaggctgaggcacgagaattgcttgaacccaggaggcagagtttgcagtgagtcgagatcacgccaatgcactccagcctgggtgatagagtgagattcagtctcaaaaaaaaaaaaaaaaaaaaaaaaaaaaagaagaagctgtgaaactccaggccacaattacagtaacaaaaagaatgggggtattctcgtatggaggaagcgccagaaaatgttattcctgaaaaagaaagtaagcgttaaataaagttaggtgtgtgtgcgcatacacacaatgtgaccccactttttgttttgagagagtctcactctgtggcccaggctgaagtgcagtgaggcgatcacagctcactgtaaactccatctcgactccagcaatcctcccacctcagcctcttaagtgactgggactacaggtatgtgccaccacacctggctaatttttaaattgtttgaagaaaaaaagagaacaaaagaaaataataataataataataaaataaattatttaaagagacaaagtctccctatgttgcccaaactggtcttgaactcctgggctcaagtgatcctcctgccttggcctcccaaagtgctgggattacaggcaggagccaccatgcctaacccccacttattttttagaatcttatgaaacgacaccatatgtcatgattaggtgcatccacatgtgtgtgagtacacacacacgtccatccacatacaaacatgtaagatatgtggaggacgccatggcagggagcaacgcacactatccacacatcctcctctgggggcgagaggtgggtctggagctggcaataaagtagcgcttgggccttatctgtcatgttggaattcttcttcttataatgaggatgtattcatgcatgcttctgtaattaaaaactaataatccttttaaaagaaaggaaatgctaggaggctggcttctgccctcacgtacctgatcacagtgatatgggacggtccactcaacccggaccttcatgaaatcctcctgattatttctgttcgtacactccttcattcattcgacaggtgccatccgcctgtcattcattcattcagcaaggactcactgaacacctgctcaggctccggctgcagccatgaacacgacagacaaggtccctgtcccaggagttcacattcgtgtgtgtgtgtgtgtgcaggcgcgcatgtgtgtgtgcacgtgtgtgtctgtgtgtgtatctgtgtgtgtctgtatgtgcatctgtgtgtgtctgtatgtgtgtgtgtgtctgtatgtgtgcacatgtgtgtctgtgtgtgtatctgtgtgtccatatgtgtttctgtgtgtgtctgtctgtgtgtctctgtgtgtgtgtctgtgtgtgtgggtcttccatggccccacaggactcctggagagagaagagaggaacattgggcagtggctgtccttcacccttgggctgaaggtgtggggagaagaggggactgtaaataggctgcccctgagtgtgcagaaatcacatattggccagaagatgtaatgacaggggtcttcaggcccagctcaaatgccccctcttcttgggagctctgcctagaacccccactccagccactggccacacgggaccctcagccgagcttcccagcacaataatgttctgctagtagctccaggttggactcacagactggcaaccggcaggccatgagcaggctactgagatattttgccatgtttgcctggtgggttacctagcccacttcacttcctgccagcacttgggtttgtaggccccgcttcatagtacacctggatgtgcatttgtctgattccccacccctaatcttgcttgctgtgtcacagtcactcagggccagtctattcccagtaggtggctggatgggtggctggatgaatggataaatgggtgggtgggaggatggatagatggatgaatgagtggtagatagattgatgggtgtgtggacagacagaaagatggatagatgggcaggtgggtggataggtggatgggtggatgggtggaaggatggatgaatggatgggtggatggatgagtggatcattgggtgggaggatgaatggatggatgaatgggtgggtgggtaaatggacagatgggtggataaatgagtggatgggtgggtgtgggtgggttgttgagtgaatggattggtgagtgggtggatggatagatgggtggatgtttggatggatggatgggtagatgagtgaatggatggatggatggaagggtgggtagatggatggatggatggatggatggatggatggacggatggatagatgaatgaatggatgggtggatggaagtgtgggtagatgggtggataggtgggtgggtgggtgaatgggtggatagatggattggtgggtggatgggtgagtgattagatggatggatggacagatgaaccaaataaaatagagggaataaactgttactcaggtgttaagcccctatgcaccaggaatcttgaggatgcagggagatgatgagaaagagttggagtgggggacatctccttctctttattaataagaagaatatgttataagctgaatgagccaacagatagttgctgtgcacctatgtgtgtcccgcaccgtaagtggatgtggaagaccataagagaaggaggaaaagataaataaagagaacacagcagggaaaggggaggagaaagaaaaggcaaagcccaaggctgttgagacaggatggtggagctgagggtagccaccagcagcctggaagggcagctgaagaggagagtggctgcaggagggagggcagggcctggggacactccgcccttcccacaaccacctgcagcccctctgctttggagaactaagtcttgggatgcccaaccaggagtgagtcattttttgtctctcggggacagcctgtgtcacccaaaggcccagaatctggggtagagacacgggtctcaatgtcaaggggatcaccaaccctgttggaacttcccccggcctagtaccagccccctaaacctgtgagccatgacaattcttctcaaagatagctcaaatacccacccctggggagggtcctgaagctcatgaatttacccattatttactgggcctccctggtgtgggtgctatgccaagggctgggatacagaaggaacggcaatctgccccttggagctgactgtgccatgggtgtgggaggctgggagggggacaattaaacaagcggggaagataacagctggtctccgtgctaggaagaaaatgaaactagggatatggtgagatcattggagggcagcatctcagtgggggtcagggaaagctgcctggaggaggtggcatctaagctgaggcctgaagggacctaggtgtgaagcttgcaattctgccttccccggggtaggtggggcccactcaaggcttcccactcccttgggtcctcagatctgtccatggacactgcccacaggccaggctcggcaatggggaggtgggcaggggaaaagcacaggtacctgcagggcaaacagggccagggagtaggctccccagagtcagccctgctaaggtggtgaacagctgtgcacatccagcagagggtgctcttggccgcttgggaaaatgctggaggccttcctggaggaggtgatgccagaactgggtgaagaggaagaggatgtggtttgcagagcctggagtttaagtcccaggaggaagaaggagcagtgggagatggggctggagaaggctcagggccaaatcaccaagggctggacatgctttcttttttgttgtttgtttgattgtttgtttgtttctgagacagagtctcactctgtcgcccaggctggaatgcagtggcacgatctcagctcactgcaacctccgcctcccgggttcaagcgattctcctgcctcagcctcctgagtagctaggattacaggcatgcaccaccacgcccagctaaatttttttatttttagtagagatggggtttcaccatgttggcaaggctggtctcaaactcctgacttcatgatccacccgcctcggcctctcaaagtgctgggattacaggtgtgagccactgcaaccagcctgttttttgttttttttgagtaggatgtgatccgcttatgttttaggaagacccctcttggctgctgcagcaagaatggacagtgctgagacaaggaaggaggtgggataagagcaaggcatcaggaccctcctatgagaccagcttgggcaacatggtgagaccttgctacaaaaaataaaaattggctggatgtggtggtgtgcgcctttagtcccagctgctcaggaggctgaggtgggaggatcgcttcagcccaaaaggtagaagctgcagtgagccatgacagtgcagccttgtctcaaaaaataataataataaagattgcaaagggagaaataggaaagatacgatttttttttttattttaagcccagaataattctgaccaaatcaataaagaggactcgggtcatgccccccaggagaaccctgtgtatttgctagcatcagaagtcatggaccagatcacctggacctcagagcaacaggacactaagtcagtgtctgagggagggtggatatacgccatggcatccagaagagaggagggaggacagctccctggaggaggtggcatttgagctggccctaaatctaatgttgacagaagaatgtggacagatgcacacgtcaggaaagacaacagcagaagaaaggggaggaggtgagagtccccagagtcatctggctcccaagaagcacagggtgggtgcaggggtgggttagggactcgggatcctgccagggtaaacatctgccctctctagcctcacctggtcacagggagcaaacactcaaaccccgcagccctggagcagcccaggaaggcagcctagctctgaatcaggcgttgtgcagagagaaagggtttgactgcggtctgaacaagctctgagtctgcaacagccccagcctccttgggccagtggagcccttggccttccaggctgggcccaccggctgcttcagcctggcctggccgcttccagggacacgaggtcccccatggcattggcacctccttggtaaatagcagatgggcagcaaagccccaagtgggaaatagctctaggaatggaggcttctgtgggtcctttgctcttggaaacacctccttcctgccaccttccccagtgccacacgtggcaccttgcagggccagccaggaagtctcagcacccagttaggccagcccagcagccctggcccagtgtccagcactagctttttgagcaacttttacctctctgaggacttagtttccccaacttaacagactgccctggtgcctcctggggatgtttttggacactgagtaaaatggtgatagaagactacagggacagccgggtacagtggctcacacatgtaatcccagtactttggggggctgaggtgggaggattgcttccacccaggagttcaagatgagcctggacaacatagaaagacccattctctacaaaaaaataaaataaaatgattagtcagggacagtggtgtgtgtgccattcatgtcattcaggagactgaggcaggaggatgacaagctcaggagtttgaggctgcaatgagctgtgaacgcaccactgcactccagcctgggtgatagagtgagaccctgtttcaaaaaagaaaaaagcaagtaaggacctgacaacaacctgaccagctgcacgttacaaagggcagatacaaagataagaaacgagggccaactacggcagcatttgcatccttctccatggtctggggccaggggaggcacagacctgtgggggtgaagctgcagaggggagggccagctgggctcaggtgtaagactccattaggcgaaactgaaaagaactgcaacaggccaggtgcagtggctcacgcctgtaatcccagcactttgggaggctgaggtgggtggattacctgaggtcaggagttcaagaccagcctggccaacatggcgaaaccccgtctctactaaaaatacaaaaattagccaggcatggtggcacatgcctgtaatcccagctacttgggaggctgaggcaagagaatcacttgcacccaggaggtggaggttgcagtgagccgagatcgcgccattgcactccagcctggacaacaaaaaaaaagaagtaccctgtgacccagcaaatccactcctaggtatagacccaagacataagtccacacgatcacttgtacctaaacattgacagcagcattcataaacattcatagaagccaaaacatggaaacactcaagtgtccatcagtggacaaacggatgaacaaaatgtggtatatccaaaccacagagtattactcaatcatgaaaaggaatgcagtactggggcatgctgcaacacggatgaaccctgaaaacattgcactaagtgaaagaagccagtcacagaagcccacatatgacatgattccattcatgtcaaagtccagaataggaaaatctaaagagacagaaagtagattggtggttgcctagggcagaggaggtgggtatagatgatacctaaagggtttcctcttgaggtggtgaaaatgttctgaagttgattgtagtgatggttgcacatatctgtaaatatactgaaaactgttcatatatataatatatatatatatatacacacacacacaaataaatcgataataaaatcattttaaatgggtacactgtatggtatgtgaatgatagctcaataaagctcttttaaaagaaagcctgcaaaccactggatgaatccagaatgggcaatgtcctacgagacaactggcctgaaattgtctaaaagcctcatggggggtgagtgcggtggtcacgcctgtaatcccagcactttgggaggctaaggcgggcggatcacttgaggtcaggagttcgagaccagcctgggaaacacagtgaaaccccttctctgctaaatatacaaaagttagccaagtgtggtggcgggtgcctataatcccagctactcggaaggctgaggcattagaatctcttgaacccaggaggcggaggttacagtaagctgagatctcgccactatactccagcctgggtgacacagcaagactccatttcaagaaaaaaaaaaaaaagcctcatgggcctcacaggaaggaaaggagaggggttgggtgtgttctatatgaaaataaactaaagaataaacacagcaaccaaggactattggatcctggtcaaaaaaaaattctgaggacagttggggaaatttggcatggattggatattaaatgatactattggataattgttaacattcttaggtgcagaagtgctactgtgtttactgaggaggacatccttattcttaagggataactatagaggtaataatttagacatgaagcatcatgatgtcagcaactgcacagcaaaaagtgtgtgtgtgtagagaatgaatgagaaaaagcaagtatagcaaaatagtaccaaccagtgattctgcgtagatgttaacaggtactcattatactgttttttgtttgtttgtttttcttgaaacagagtcttgctctgttgcccaggctggagtgcagtatcgaaatctcggctcactgcaacctctgtctcctgggctcaagtgattctcctgcctcaggcccccaagtagatgggatgacaggtatgtgccaccaaacctggctaatttttgtattttttagtagagacaaggtttctccatgttggccaggctagtctcgaactactggactcaagcaatccaccagcctcggcctcccaaagtgctggaattataggcatgagccaccacacctggcctcattatactgttcttttgatgttttgatatatgtaatatataaaagtcagagaagagatgtcatttttgcctttgtcttatgtctcaggaccttgaatgtcccggatttgccaagttgattttattccaaactgcactgaatctagccactttgtaccatgccctgccacattccggccctggcaccatcctccccctgcatgactgtaggcacctccatcactgggttcccccaaaaatctgttcttcaattgacagctcaaggagtctttccaagacgcacatagaattgtctctccctgtggccctgataatgaaggaagaggccgggcacagtggctcacgcctgtaatcccagcactttgggaggctgagatgacaggatcacttgaggccaggagttggagaccagcctgggcaacatagccagaccccatctctacaaaaaatttaaaaattagccaggcatggtggggtgcacctgtggtcccagctactcaggagacctagatgggaaaatcacttgagcccaggaagtcaaagttgcaatgagctatgatttcaccagtgcactccaacctgggtgacagagtgaaactctcttcctaagagagagagagtgagagagagagagcaaaggaagtcctcacagtggccccctcggccacctcctggatcctccagtgagttttggttatccaccccagggccttgttcatgctcttccttcctttaaacccttctattccctgtcaacgccttctcatctcttatgtctcaactcaagcctcactgctcagaggagcctcctcgaccccctcctcctccctcacagtccatcaggttctaaagacctctgttccttcttccaaccgcgtcctggctggtggccttgaggactgctggggtctcgctgcggctgtgtctggagctgaagcgagatggcctgacatcagtttccgttgttgaggatggtgtgtgaatcacatcttgcgctagagaatggtgcgtctaaggctcagcacacagcgatacctcgggaaatgtttgctgttatgcgactcaatacctggcctttggtgtggtcgtttgtctggcgtctccctgccccaccagcctgtggactccatgagggcagggcagcctggggttccctgctcattctggccctgagcacactggagagacaggcagtgcacatttttaaggaaaatgaaagacatggagttggatgaacatagggctgtctctgtgttcagggggccggcatgacggtgcaggagcagtggtctttgtccctttagctgttgccatgtaaatggggttcccatggagtctcagacccacctggctatggtctgcaacctttggctgttcttgcttaaggaacaggaagatgtgactttagcatgacccaaactgcaggtttacacgttggtcatgtctgagttaatgaagggtggtagacacagatatgacccccagggcccacctgcaggaagcccactgccatagcctccagctgtagcccttctgggcctgcctccactgcagacagctgcctcgccacagtcacatcctgcaaggtggccccacgctgtgactgatgaaggcggaggtctaaaggtcataccactttggcccaacacaggacagcggtggtggctactccagccctagaacgccctcctgcttctcacccctgctgatcccaggtgttgacccctaggacactctaccactcatcctgcacactgaactctgctttccggagaccccaaattgcagcttggggtgtgcctccattccaggaggaggcaaagaagctctcgctcctaaagcagaaagttccacagcttctaggtatgcatgaacgcatgtccttgatggtgaggacagggcccagccttcatatgccacttacaatgcagaatggccagctgagccctgggaaggacggctaggaccccaagtttttttcctgtctatggaaaagcgttcctcccagggtgccccttgtcactggtggccctagatggtgacttcccctccctggacttccacctggcagaatgatgccgacatactcaagaccacagaagtgggctgggtgcagtggctcactcctgtaatcccagcactttgggaggctgaggcgggcgtatcacaaggtcaggagttcaagaccagcctggccagcatgttgaaaccctgtctctactaaaaatacaaaaattagctgggcatggtggcggacgcctgtaatcccagctacttgggaggctgaggcaggagaattgcttgaacccaggaggcgtaggttgcagtgagccgagatcacaccactccactacagcctgtgtgacagagcgagaaaaactctatctcaaaaaaaaaaaaaaaaaaaaaaaaaagaccgcagaggtgaggggacaggaaagaaaactagatcttcagtgagaagtgacgtagacagggcactccatctgcagaggtggagtcctgaggagcaggaagctgtgttttcacgtcatgttttgcccagctgtccctgcccaagtccttgtcagcctctactggtcccaagaccatgggcctgcatgctcattaggccatgggcagcccgccttctctctgcttgcaaacctatctgacccctgtgtccatcccaccttgccccaacgttggccaagccaccatcttgcctggtttgaaccactggtctctatgcttctgatttctgcttcctgtggtctcccgcagccacagagcaatctttcaacaagtaaatcagacgagtcactctcccacttaaaactctccaagagcttctagtagcattagactaagatccaaactcctatgacaacccacagtgcccctgcctgctcagctcttccctctcacctcacccactctccctccgtcactgtgctccagccttcctgcgttctgtgatcccacaaaacctattccctgctctgcgcctgtgttcatgccggggatactttccccatagctctccttgctggatttttctcatgcatcaggtcttagctcaaatgtctcctcttagataccttaaagaactaaaagtagaactgccatttgatccagcaatcccgctactgggtatctacccagaggaaaagaagtcattatatgaaaaagatacttgcacatgcatgtttatagcaacacaattcacaattgcaaaaatgtggaaccagcccaaatgcccatcaatcagcaagtggataaagaaattgtggtatatatatatatgatggaatattactcagccacaaaaagaaatgagttaatggcatttgcagcaacctggatgagattggagagtattattctaaatgaagtaattcaggaatggaaaacctaacttgtatgttctcattcataagtgggagctaagctatgaggatgcaaaggcctaagaatgacacagtggactttggggactcagggggaaagggtgagggggggtgagggataaaagactacaaactggttcaatgtgtactgatccaaaatctcacaaatcaccactgaagaacttactcatgcaacgaaataccacctattcccccaaaaacctatggaaataaaaagaaatcaaatgtctccttttaagagaggccttcctccgggcgtggtggctcacgcctgtaatcctatcactttgagacgcctgtaatcctatcactttgaggtgggcagattgcctgagctcaggagaccagcctggccaacatggtgaaatcccatctctactaaaattacaaaaaaaaaaaaaaaaatcagccaggcatggtggcaggcacctgtaatcctagctactcaggaggctgaggtacgagaattgcttgaacctaggaggcagaggttgcagtgagctgagattgtgccactgcactccagcctgggcaacaaagcgaaagtctgcctcaaagaaaaaaaagaaaaaaaaaaaacagagagagagaaaggccttcctgaaccaccttatctgaagcgactcacccaagatccacttactgtctattatatcactcacttactctctcagaagttctcgctgggtgccgtggctcatgccagtaatcccagcactttgggaggccgaggcaggcagatcacaaggtcaggaggtcgagaccatcctggctaacatggtgaaaccccgtctctactaaaaacacaaaaaaattagccgggcatggtagcagttgcctgtagtcccagctacttgggaggctgaggcaggagaatggcgtgaagccgggaggtggagcttgcagtgagctgagaaggcaccactgcactccagcctgggcgacagagcgagactccgtctcaaaaaaaaaaaaaaaaaagaatttctcgtaactggccaggtgaggcggctcatgcctgcattttgggaggctgaggagggaggattgttgatcccaggagtttgagaccagcccgggcaacatagtgagacctcatctctacaaaacatttaaaagatttttttaaaagagttcttataactgggctgggcgcagtggctcatgcctgttatcccagcactttgggaggccaaggcatgaggatcacgaggtcaggagttcaagaccagcctggccaacacagtgaaaccccgtatctactaagaatacaaaaaattagctaggcttggtggcaggagcctgtaatcctagctacttgggaggctgaggaaggaaaattgcgtgaactcgggaggcggaggttgcagtgagccgagatcacaccactgcacaccagtccaggcgatagtgcgagactccatctcaagaaaaaaaaaaagagttcttgtaactaagggaaacattttaccttttgaatatattgttttacttccttatgacctgactgttctcccacctgacaacaggtctctcctgccttggttccatctgttgctggtgggagaacagcccttggcacgggacaggagttaagtgaatgtttgatggatgaatgaatgggtgaagctgtccagcctctgcaaggacgggcagggcaggaggagcccgtggtccacgctttcgagggagttctgcagacaaaggcggatgaggggcttctgttgtcttctgtttcgcattcataccatatggcttgttgcacactgggctgaattgcagatgctctaacttggagctttcttgcttttgtgtgttaatgacataaagatagaacatagctcaccacacattttgtgtttgctaactatctatatgtatataaaacagacttcagtgttactagccaacccacttgtgaagtggaaggaaaacagagcaattagagagagagagagagagagagagacggagtgagagcaaggcgaatgtgagcttagaatggggccagatcccggggcttgtgctgtgcgtgcttcctggggcagggtaggtggtgggagagatgggcctctgtgcttcccccaacctcagactctgctcaaatgcacctgatagcacccgcttcctccgggtcttccccaggaaaggcgctcccctgtcaccccacctccgacactgcctgctcccccttccaggccctcctgcacacatctttcactcaaacctgtgaaatatggagcgcctcccacgggcctctgtgcggcttccttctgccaggaaaagggcccccgacaagtaaacaaatgtccaattacaaaatgtctcaggtgctgtggagaataaaaatatggagcttaattaaaaggaggaagcatttattccagcatgtgagctgtatttcaaggcaaccaaatagccctgattgatatggaaaatttctttccggaggactctagtgaatcaacaggggtataccaaggtggggaggggaaagtaggggcactttgtccccatatttcattgctggcatagtttagagtctcaaggccatggtcatgataaaaagcaaaggacttggctgggtgcagtggctcacgcctacaatcccagcactttgagaggccaaggtgggaggactgcttgagcccaagagttcaagactagcctggggtggccaggcacagtggctcatgcctgtaatcccagcactttgggaggctgaggtgggtggatcatctgaggtcaggagtttgaggccagcctggccaacatggtgaaaccccatttctactaaaatacaaaaaattagctgggggtggtggtgcatgcctgtaatcccaggtactcaggaggctgaagcaggagaatcgcttgaaccccagaggtggaggttgcagtgagctgggatcacgccattgcactgtagcctgggtgacagagtgacactccatttaaaaaaaaaaaaaaagaccagggccaggagcggcggctcacacctgtaatcccagcactttgggaggcccaggcgggcagatcacgagatcaggagatcgagaccatcctggctaacgcggtaaaaccctgtctctactaaaaatacaaaaaaaactagccgggcatggtggtgggcgcctctagtcccagctactcggggggctgaggcaggagaatggcgtgaacctggaaggcggagcttgcagtgagccgatatcatgccactgcactctagcctgggcaacagagcaagactctgtctccagaaaaaaaaaagaccagcctcctgggtaacatgatgagaccccgtttcttttttctttttagaaaaagagcaaataactttcagtccactttatgattgctgggtctttttgtgttttttttacttttgcgatgagtctcgctgtgttgtccagcctggagtgcagtggcaacatctcagctcactgcaacctccacctcccgggctcaagcgattctcctgcctcagcctcccaagtagctgagactacaggctcccgccatcatgcccggctaattttttttatttttagtagagatggtgtttcaccatgccggccaggctggtcttgaacctctgacctcaagtgagctgcccgcctcagtctcccaaagtgttgggattacaggtgtgagccaccacgcccagccatgattgtttttaagttctctacagactatgaattcctactcccattgctgcatcagggtagactgctttcaaaccctgtccctccccaggtatgcctctagtttggaagaaatgaaggaaatagaaaaggcacccattttgcaaaccctaatcaaatgaatgactgattcaggaaacattatcgatgcatgaaactgttgggtcaggggctgatggggaacttgaccatggaacgataaggctgtcatccaccacctgaccccactggccaatctcagcatcatgagagtgggacagccagacaccacgggtcctggagctgaggacaggtgaacacacagcatcacctctagacacgaatctaattgggcttctagagcttgcttccatctccaaagaatatggggagagaggaacgagttaaacaactccatgaaaaagccaacagacaaatccaggatgtgcaatgatcccacaggagactgacccggtttctgcagcaaacatggaaaagagggggctgtgttagggtacaaaagacaaaaagatacaataagcagatgtgatgcgtggatccagttgggattgtgactcaggccaacaattaaaagacatatttgggacaactaggaaaattgtttcatattccagctaatttttagtagtgacagggtttcaccatgttggccaggctggtctcgaacccttgacctcaagtgatccgcctgcttcagcctcccaaagtgctgcgattacaggtgtgagcctgtatgaatacatgtgaatataaactgataccaagaattagtgttcattttggtaggtgtgttactggtgtggttatataagaaaacactcggccgggcgcagtggctcacacctgtaatcccagcactttgggaggccgaggcaggtggatcatgaagtcacgagatcgagaccatcctggccaacatggtgaaacctgtctctactaaaaatacaaaaattagctggacatggtggcatgtgcctatagtcccagctactgaggaggctgaggcaggagaatcacttgaacctgagaggcagagacagcaatgagccgagactgccccactgcactccagcctggtgacagagtgagattctgtttcaaaaaaaaaaaaaaaagaaaccactcatcctttttcaaaatgcatactcaagtgagtaacagtaaaatgacatcatgtttggaatctgtcttatgattcttcagccaagagaaaaagccctggctcaaggaagcagatctgacggcattttaattattcaatctgtaggataagtcaatgagggctcattatactatcatctctttacttgcgtgtatgtttgaaaatttttacaatgaaaacaacagaagcaaaagaagatgctgagaggaaattggtgagaggtgaaacataaaataacagcactgagctggagacaatggaatttagagattgtggccaggaaaggcctcctccaggaggggacgtcgatgctgaaggagccttcactaagaaagctggggaaatattggcggggagtgggaggcgtaggaacaggtgcaaacgcaccaaagaagcaaaaggcatggagtatcagagaaaaggggagtgagccaacaagccaggaacagaggggccacaggtaaggaggcccaggaggagacggcactagcaccagcccagccagatggggcctcgtgctccctacaggagatgtggtgtgatcacaatcagtgggatgctgtcagagggttttaagaaggggcagatttgatgggatgtactttttctttctttttttttttttttcgagatggagtttcactcttgttgcccaggctggagtgcaatggtgcaatctcgactcactgcaacctccgcctcctgggttcaagcgattctcctgccttagcctctcgagtagctgggattacagatgtgcccggcccatgcccagctaattttgtatttttagtaaaggcagggtttcacagtgttgaccaggctggtctcgaactcctgatctcaggtgatccaccagctttggcctcccaaagtgctgcgattataggcgtgagccactgcacctggctgacctctaagagttgattctagctattcagtgacaaaggcattttggtggggaagagccaccgaagatgaagagccagttcagcagacagtgcaactttccagcctgcagaccatggcttggtctaggatggtggcagagaaggagagaagtaaacagattggaaatatctggggatcagagagccactggggctggctggtgcatgccatgtagagggggttggaaagggaaattcaaggctaagtgccaggcttggggtttgagcagccaagtaaatggtggtgccatttttctgggatgtgggagatgcacattgcgacagggtggggaaattcagagctcacctttggatagcctacatcaattagcaacgcttgggaaacaggcaagtgagcagagctgccaagtgggcagggcagaggcgtgggtgggagacagcagggcctcctggggagggagcctatggagctcactgctcccaagctcccagggacgttctgaagaatcccatcatttacacagaggaggaggagccaaggcatgaaggggagcagccaggaaagagggaagggaaccaggagaccgtgtcgtcccttaaacccagaggagaggtgttctcaaaaaaagggagtggcagggtgtggtagcacccgcccataactctaacactttgggagactaaggtgggaggatcgcttgaggccaggagtttgacaccagcctgggcaacatagtgagaccctgtctctacaaaaaaaaaagaaaaaaaatccaaaattggccaggtgcagtggctcacgcctgtaatcccagtactttgggaggccgaagcaggcggatcacaaggtcaggagttcaagaccagcctggccaacacggtgaaaccctgtctctactaaaaatatacaagaattagccagagatgatggcatgcgtctgtaatcccagctactcaggaggctgaggcaggagaactgcttgaacccaggaggcagaggttgcagtgagctgagatcgtgccattgcactccagcctaggtgacagagcaagactccatctcaaaaataataataataataataataataataataataataataaaattagccaggtatggaggtgcacaactgtagtagcagctacttgggaagctgaggtgggagaatcacttgagctcagaagtttgaggctgcggtgagccatgatcacaccactgcactccagcttgggtgacagagtaagaccctgtctcaaaaaaagaaaaagaagggaataatttgctaggcccaacattcctgagagggctgtgaaatcaagcctggtgtgtgcccttcaaagttggagaaatggggggcactgctgagtacctttgtccatttgggctgctgtaaaaaaatcccatagactgggtggcttatagacagcagaaatttatttctcactgttctggaggctgagaagttcaaggtcaagacaccagcagattcaatgtctggtgaaggcccgcttcctggctcatagaaagtggccttgtcactgtacccttacatgctcacatggtggaaaaaaacaagggagttctcttgggcttcttttttttgcgacagagtctctctctgtcgcccaggctggagtgcaatggcgcaatctctgctcactgcaacctctgcctccctggttcaagtgattctcctgcctcagcctcccgagtagctgggattacaggcacccaccatcacgcccggctaatatatatatatatattttgtatttttagtagagacagggtttcactatgttggccaggctggtttcaaactcctgacctcaagtgatccacctacttcggcctcccaaagtgcggggattacaggtgtgagccactgcgcccggctggcctcttttacaaaggcactaattccctcccacaggcctcctaacaccatctctttgggggttaggattttaaatgtacagatgtggtggaagcttcggtgacttcgctctctgcttctctcctcttcctgagctgcttagggacccctgctgctaggcgcttttttccctgcatttcttatgctgttctgtgatgagcagggccctctttttctcctccaccggggtaagcatcttgagggcaggttgcctggttcagacttcaagccccagaacagaattcatccctgcagccattcccgcaggctaaaagagcaccggttgtgtgcacggcacctcgtggacccggtatgatggcactataactgatttccctgttacccaccagcatgaagggcatgaagacagggaacttcattagctgtccccaaacacaggaaattagttcattgaggccaggtgcagtggctcacacctgtaatcccagcactttgggaggccgaggcaggcagattacgaggtcagaaattcgacaccagcctgaccaacatggtgaaatcccgtctctactaaaaatacaaaaattagccaggcatggtggtgcacacctataatcccagctactcgggaagctgaggcaggagaatcgcctgaacacaggaggcagaggttgcagtgagccaagactgcaccactgtactccagcctggatgacagagtaagactctgttccccaccgccccccccaaaaaaaaggcaagaaactccatcagttgtccccaaacacaggaaattagctcatcaatcacccaccaccccaccaaaaattaatcagggtaaacttaagaagggactccttgtgggaaccaaggaacagaccctgaaaatatagaaaatatagctatcttctccctaaaggccaggcacacagaacccaccacggccctcacgtcagcctcacattcatcctcttcattatcctcctggccagaggagaagtgacttccccaaggtcacatgaaggaacactggagttgggttccatgcacaccagggcacttctcttcagcagaggggatggcaccatgggcacctgccagccactgcagccactccagggcctctccctgcaggatgctctcctgaatgagcctcatatcaggggctgcccatcctttggcctcccgacacccctgcccataatttatctttcccttacactgacacaatattttaatattttaatatttttttagagacagggtctcaccctgtggcccaagctggagtgcagtggtgcagttacagctcaccgcagcctcaaactcttgagctcaggcagctctcccgcctcagcctctcaagtaactgggattgtaggcactcaccaccatgtctggcattttttttttttttagagagggggtcttgctatgttgcccaggctggtctcgaactcctgggctcaagcgatcctcccaccttggcctcccaaagtgctgagccactgtgcctggcctggacacagttttatatattaattttagataatatcacacactgacaataatgaatactggcaaggatatagagaaaagagaaccctcatatactattggtgggaaagtaaattaatacaaccactatggagaacagtatggaggttgctcaaaaaaaactaaaaacagaactagcgtataattcagcaaccccactgccatgcatttataaataatctggttagttataaattgtatttttataaattgtatgttataggtatatttctaaaggaaatcggtatatcaaagagctagctgtacacccatgtttattgcagcactattcacaattgctaagatttggaatcaacctaagtgtctatcaatggattaacggattaaaaatgtattacacacaaaaaacaatcacacactgagttgtttcttttttttttttttttttttgagacggagtcttgctctttcacccaggctggagctcagtggcgcgatctcggctcactgcaacctctgcctcctgggttcacgccattctcctgcctcagcctcctgagtagctgggactacaggcgcccgccaccatgcccggctaattttttgtatttttagtagagaccgggtttcaccgtgttagccaggatggtcttgatctcctgaccttgtgatctgcccgtctcggcctcccaaagtgctgggattacaggcttgagccaccacgcccggccgagttgtttcttttttaattctctttcaaatgatccagttaatcaaagagaaagtatcagtttgaagctaagaagctttaacacctcgctaatgtttgcgtttctcccttctaaaaacactgtggggcgggacgcagtggctcacgcctataatcccagcacattgggaggccaaggtgggtggatcgcttgatctcagcagtttgagaccagcctgggaaacacagtgagaccccgtgtctcccaaaaatacaaaaattagccgtgcatggtggcacatctgtggtcccaaccacttgatgagtggattgctggaggtgggaggatggctagagcccgggaagacaaggctgcagtgagccgtgatcacactgctgcactccagcctgggtgacagagcgagaccctgtctcaaaaaaaataaaataaattgtggtaaaatatacacaacataaaattgaccattttaaccatttttaggtgtacaatgcagtgacattaagtacattcatagcgtgcagccctcccatcatccatccacagaactcttttcatcttgtaaaactgaaactctgtaccattaaacgaaaactcctcatgtccctcccccagcccccagcaaccaccattcaactttctgtgtctgtgaatttgaatgctctagggacctcccataaacggaatcacagagtcacctccttctctacacaggtggagatcagggcctcaggctcatgtcttgggcaggcagcagcctctgcctcctgttgctgtcctgagttataaacattttcttacttcccttctctttgtggctagcaaggctgctcttcttccatttatgataatggattgaaatctacttttcaaacaagtggatctaagtgagaaatagaattcatagtgaaaggctgaaggtggagaggctctcacagcagaggagaaaagaggggaagaagttgggaggtggagaaaccctggccttgggagtgaagcctcctttgtgtccagaataccagcgaaggaatgcgcccctgactcggtgcacccggcctccttggcttcctatcgcctttcgtagctttcacctttgccctcatccattcatccatgcacttatttattcagcaaacttggctgtccagagcctatggttggccctggggaatactccggccccccggcctgggacgctcccaatctaactcctctgcaaagccttcttccgtctcttgttctgtttgtttaatcctaatcctaacctcatctaggaccctatcatgcagactctgagtcagctctgaattcccacgtgaggtcccaaggtcagacaacgaccttggccaggttgatatttaagggagtaaagacatagggtgaggtggctccacccaaagagggcagcctcctgctgttgctctgcacacgtgtgggctcaactgtgccaaatcatcctattgtcccctgagccagaggccctcccgtatccaggaattcacagctttgctagcatgctgggctggccagtggtgttccagatgagtcctgcttggttagaccccagctttcccacagagtgtgtgaggtgttcctgggagctcctggagggcagggccatgtcggtccactccagcccactagagcttgccctgggctggcacacagaggcttccaaggccaccaggctgagtcatcagtggattcccatatgactgatgtaagcgtgtggccgagggatgatgccaggagaagtcaggattcctggggaattgagacaatgagtctaatgtccactcccatgtgcaggcctggcatctacacaaccagggccagtggatttccagaccttccacatgaggggccaacgtgggtctgcaggactactaggaggctcactggtaggcacaaatgggcctgcccaggactagacaaactttcacggttcattgtcctttgacatccatgactgtcttggttgcaagttataagaagtccaaacccaactggctacataaaaacatgaaaatagcgaattggctcctgtatccaggaagcttctagtaatccagtcttgggcttgattggatccagaacctcaagggatcagaagtctgcctcccagaacctctggctctgctttccaggaaggacttccctctacgaaaggtcaacttatgtggcaagatggcctcatggctgcaggcccacttctagtcggcttagcaactcctgaggctcgtcattggcccagcctgggtcattgtgcttatgcctgagccaatcgcatggccaggaatgcgggattctgattggccaaggcccctcccccattaaagtgcagagagggtgtagcttggaggaaaatgctggaccctgacaggaagggagaggccagggcctttgctatcccagcccgtgctctgtcttgcagctgtgcctgtcttcagaaatcccaaaatgagatttaaatgaaagctgagggtatggcagtcagacacagaacagaacactcttgtgtgttaactggtgctgagagggtagcttcctgctgcgtatctgcccagccacccccacctccccaacctcatcacacactcccactctttcaagcatcttcaaattagtctctgccctttttttttttttttttttttccagagacaggggcttgctgtgtcacccgggatggactgcagtggtgagatcacagctcactgcatccttgacctgcagtgatcctcctgccttcgcctccagagtagctgggactacaggcgtgcaccaccatgcctggcttatttttctatttttttgtagagatgggggtcttgctttgtagcccaggctggtgtcaaactcctgggctcaaaagatcctcccacttcggcctcccaaagtgctaggattacaggtgtgagccactgtgcccactgcccaccctgtctctactccttacaaccctgaagttaatacagaatccaaaaatgtcagctgccatcattatcctatcatacactaagttaaaaggccaattttaattttccctggaagttttcattggtcacagcctccatctgaagaagcgatggctaggcttgctccccaatgtaagaggaggttaggccgggacagaagcaccctttcactggttttcatccttcccaccttggtggctttacacagcagtgtgcgctggttctgagcaggaaccaagccttggggagcatgggttgggcccttgcctggctggctggggggcctgtgcaggcagattgtcccgcccagggaggacaggagccaagcctccagggctttcccatgctcacgttccctggcgctgggccgcagacactctgtggttgacagcctggtcctgttcatcttgcccggctcccacttcacagctcacactggtatagtgtggccccctcctcttctagtatttccatgtgtagcctcacaagataactggctcatccaggtggccacagatgtccagcttggccccacagcaaggccttagccagctccactgccagccacagcccacaccttccctgatcaacctttgctagcagcggggctctttaattgtccgctaagacgcctttgaggacctggtagaagttaggctccagctgcctggggaaatgcacatgggcccaacagtaggcaggctcctgggtctccaaaggctgtccagggatcccatgttaaggaatcctatctgggaaggacttcccccttgcaatcccttggtcttccttctccttaacctttatgtcctggtgcccgtcctccatcatcagagcctgaaccatataggaagctaagcaaataacccccaaatctctttatgagtaataacaacacaaattgagcagttaccttgtgccagatactgttgaaaacacttgaggggtattaatacatttacccctcaccgcaaccccatgacgttgggacaattagaattatacccattttacagatgagaagattaaagcacagagaggttggagaaccttcccaaagtctcatagcaaaggggaggtgttgccctccctacacagcagctggttcaccacctctgatgcaatccacagtctccctcaaggctgggccaatgctcgggagctctggacttgaggcaagcacagaatggaatgaacccaaacacccaaaggtgagctgccctagaaaggcggacattgggccgggtgcggtggctcatgcctataatcccagtactttgggaggcccaggtgggcggatcacctgaggtcgggagtttgagaccagcctggccaacatggtgaaactccatctttactaaaaatacaaaattagccaggcatgatggcacatgcctgtaatcccagctacttggtaggctgaggcaggagaatcgcttgaacccaggaggcggaagttgcagtgagctgagatcgcgccattgcactccagcctgagcaaaaagagcaaaattccgtctcaaaaaaaataaaaatgaaaacaaaagacatcagtggtttctgaagactccaagctgctgtataggctgtgtctgccatcttggacacaacttttctattgttcctattaaatgtgttcatccttctggcttacatgccattttcttcatgcaaacttcttgccatccaaggatgggttggatacatccttctccacatgaagtcatagccccaagactcttcccttcccagccctatcatgctacactgcaaatgcatgacagcctcccttccacaccggaagctcccaagagggcagggattgtgtcttgctttgctatgtcttgaattaaaaaataataataataattattggctgggcgcagaggttcacacctgtaatcccagcactttgggaggccaaggagggagaatcacttgaggccaggagtttgagatcagcctggccaacatagtgaaacactgtctctattaaaaatacaaaaattagccgggcgtggtggcaggcgcctataatctcagctacttgggaggctcaggcagcagaatcgattgaacctgggaggcggaggttgcagtgagctgagatagcgtcatcacactccagcctgggcaacaagagctaaactccgtctcaaataataataataataacaacaataataataaggccgggcacagtggctcactcctgaaatcccagcactttgggaggccaaggcgggcggatcacgaggtcaagagatggagaccatcctggccaacatggtgaaaccccgtctctactaaaaatacaaaaattagctgggcgaggtggcgcatgcctataatcccagccgctcgggagactgaggtaggagaatcacttgaacccaggaggcagaggttacagtgagctgagatcgcgtcattgcactctagtctggacgacactctgtctaaaaaataaataataattattattattatttaatttttattgagtaaaagatacattcagtaaagtgcacaaatcctaggtgtgaacttttatgtatgtatcaatcaatgagcttttatgtatgtatacagtcatgaaaccaccactcagatcaaagcatacatgtctagcccctagaagtttcccctggtctcctcccggtcattactcctcaccctaggggtaaatactgttacggtgactgctgtcttttcttaaacttcaaataaatggaaacttcaaataagtgtgtctggcttcttgggctcaacatgttgtctctgaaattctcatgttgctgcatgattccttggtttgtcctttttattgctgtgtggtattccattgaattaatataacaacatttatgtatccattctattcttgatgaacatgtcagctaggatgtggaggatttgggctctatctttgctggtgggtgtatacattgctgtaatgactaaggaaaactgtcttgtctaccatcattataataactcatttagtgagcatttactgtgtgccaggtactgtacaggagtcagctacattatctcaatcttcacaatgatccttgggagtagatagttgccatctgtgaaacaggataattgtggcatcaacatgaataggattattgtgaagtttaattgagatgatactttgaaggacttagcccagtgctgccattttggaaacactgtttatgatacctgttactggtgattcctaacgggcacaggatggggggttcaggtgcctgggtccctgctgagcaagtagcccagcagccttggcctcagagcacctgggggaatcatgaatttgtgagcctctttgataagaccctggctctaacttcaagaaaacggtcactaggggagggtgagggacaggactgagactttagcttaagaagggccctgggagcattccagagccttcttttacgcacatcttcctgaagctgagtacagagggtactctgaggtgatgactgttccttacctgtctctctcattagccggtaagccctgcaagggcttggccagtgcctgtctttcaaatgttcattcagaaacaatttaagtgtctcccttggtccaggcactatgccaagaactgacagatacagcagtgagcaagatgggcaaggtggggagagagacaagaaacagagaggcaccaagactgtgtaggggctgggctcccagcactttgggaggccaaggcgggaggatcgcttgagctcatgggtttgagaccagcctgagcaacatagcaagaccctatccctacctgccaccccccaccccccgccacaataaaaaatacaagtcttgagggagaaaggacagaggagctgtggagaggaggcctgaggtctgagggtgggggatcagggtcaggtcctgtggagcctgtagcctaggacacggagtgtggatttgacccttatgcgaaacaactggaaggctttttgtttctttttctgtagaaatgggggtctcactgttacccaggctggtctcgaacaccccaagggatcagccgtctcggcctcccacaatgctgggattaaaggcgtgagccaccgcgcccggcctcaactggaaggctttaagtgagagatggggtgcaagggaatcccagagtcagaaaggtcttcagagagccaggaagggcttgcgggggaggggcgcatatggaaggggcgcatggaaggaactcacagattccttgaatgaatgaatgaacgacccaatgcactgacggatgaatggacaggcggccaggaatagcagccggcccccagggagccccagaccccgcggcctgaagccttggttctaggccaaggcacaggcgcggtgaccttggggatgtccccgcccaggactcagggcccggaactcggcgtctcgggggcggggagggcgtgcctggcgggacagcgcgcgcggaggaacggcgggcggtgctcctcgggtaggccccccacacatccccttggctcagccctgccggggcccgaacccgcgccgcccgccgtgtttacattccacccgcgccagccacgcggctttttgccgctccagcgccgctcggccccgcccccggcgcccgcggcccgcccctcgccgccgcgcgccagacttctcccgcgtcccgcccgccgccccgccccgcgtcccgcgccccgcgccccgcgcccggccctcggcgcgcaggccctgtcacttggccccgccctgtccgccggccccgcccctgattccccgtccctgcgcctcgcgggccggcgccgtggaggggcgggtccgggggcggggcgagggacggggcgggacgggctctgggtcccgcgcggccgctgaggggctgggagccgcggcggggcggtgcgagggcgggccggggccggttccgcgcgcagggattttaaatgtcccgctctgagccgggcgcaggagcagccggcgcggccgccagcgcggtgtagggggcaggcgcggatcccgccaccgccgcgcgctcggcccgccgactcccggcgccgccgccgccactgccgtcgccgccgccgcctgccgggactggagcgcgccgtccgccgcggacaagaccctggtgagtctactgccgcgggctgcggacagggactcctggggcccagaccgcgccggggagctgggtgggggcggggtgcggccgggtcgcgggtccccgggcggcgtcgcggggcgcccgggagggtgctgagagcgcggcggggtggggtggaggggacactgaggcagcccgggccccgggaggcgacgggccggtgagggcggcgggggcggcgggaccccgggtcgggggtcggcgggtgcccgggtcgcgggtgacaggccaccccgccatcggccatcttcctggctcgcccggccgcccgcgcgcaaagggggaaggggtactgggcccgcggcctgaccccgccgccgcctcaccccgcgccgccccgcaggcctcaggccggagcagccccatcatgccgagggagcgcagggagcggtgagtgcccgcgccgcggggccggacgggacgggacgggacgggacgggtggcgtgggggaggggcggccgcgggtgctcacccggcccggtgccacccgggtccacagggatgcgaaggagcgggacaccatgaaggaggacggcggcgcggagttctcggctcgctccaggaagaggaaggcaaacgtgaccgttgtgagtacaaaagagacaggttggggagcatcccccccatctcacctgggtacccgacttggctctgcctacgggggcgggggtcccttgggcaggaacggagctcataacctgatcagctttctcttcttctctctgtttttgtcttgtttggtgtgtttccttggggtcatgggggtggcttcatgttagtttttgcaggatccagatgaagaaatggccaaaatcgacaggacggcgagggaccagtgtgggagccaggtaggtccgcccggggttgggcctctgtggaggtccttctccccctgggtcacatggggtttcatgctgtcttgtctcttgctggagacactctggtgagagtgaacttctctaatgcagccacagcccatatggcccagcactgtacctgtcagtgggcactggcctctgccagtcctgggattccaggaagcttggtgttcctgactggcaccgtctgagattacagatatgtgcctagcctggaagaaccagaatggacatcacagtattcagtcctccccttctgcccaggaggaaactgagactcagttagaggaagaaagtaacccagagtcctgtgccatccaggggcaaagttgggctctcggccttgtctgtaaaagctggtgaactgggggagggttcctgggtgtttataagcaacaactttccccctatctacacctatttttcttgtcatggtgtttaaggacctcctccgtcttctgtaggtcagatttcaaattcttctcctctttctggccctggaagttcttatagcccctccagcaattacctgcattgatccccagctcagcctgacctcagcaagagtatcagtggaacattcagtgtaatgataggtggtgtctcaatacatttttttttgactgcttttcttttctctccttaaggagttcctgccaaatttcctgcatgcagtgtgataatcattataatatcagaagtttcttgcagaaaaagcttgtactatctctttactttcagaaatggctggagactgtagttatggctccagtgggggaagcagcctatctctaaactagctggtcaggccttctgactctatcacagataaacgctgaacagaaacagtgttcgacctgagtgcagggatcccagctaggttagcagagaagcccctcactttgcagagcagcagccagggtagttcatctggaagcgtgaagggtttcaacgcagtgcgccgtgttctaaatagcagttgtcactgcatgtaaggtcccccgaaataagcatttctgaggagggtccactgactattgaagaaagggttgctgatttcctttttcattcaaagaaatcatttcagagacggaaatgagacggcatatccccagttttttttttcttcccttaaagtacattcaaatcaagcaagttgattttttaggtattataaaatgaattctgactttgtgaaattcaggactgtttattttcccagctgtgttttgaatagaaaagaaacttccagctgaagatgaagcagggccgtccctgttgcattcttggagttttagaagcatgtctgttctcaaggatagcctgagcagtgacgagggtgcctcctgggacggattgtggctctgtcccctggccacagtgtggatagctgtgctgccggaatagccataccatttcccactagaaggcattttcgtggttatccagagattaatggcgacagatttctatacgttttgtagagtagatagcttaaacattagctgtctatgtatggagcagtatctttgttatttctttgtggagcttcatgaaactagaacttgggggtacaacagaacctttttccctgctcacatacagaatttttctctggagttatcataattccccccagtacgacagtcttgagctacttggagccattgtgccaaactcttgtgtaactgcttcatcgagaccacatggaagctttttaattttcatcttaggctgttcttaatgaaaagaatacccttttatctaagatctacttaacacgtccattttgttgtttaatttttttgcacaagactcaatctttctattgaagtggaatcctggactgttacttttcagaaaataatcctatgtaaggaaaaaagtggtatgaggagttggagtggttaggaatcccgtgggtctcttattgttatctcattctttcctaaataaagtcagacagatcttgctttgaaacttggtgtacactcaaggacatagacttaattattctacctcatccactggtccctaaaaaggccaactttggaaaccatttgtctgctgatggttcacctagtttgggaactgctgctggactcatctatgtccaaaggcctgctctcagatgtgccagccatctggctgtagagggtggcacccagcattatgccttcaagactagaattcattcttcctgaatgaagaacaacttacagcggttgtaatgtgaccctttttgagttaaggaaatgccacccgcacatggtactagaactgaaaggaagcagccttgctcgcacagctgttggcaggagctgtcatggataatttgcatgcccaattctttgtacattgggtggggaagagctttatctggctttgctcttctaactgaaagtgcttgggcttcctctgaaggcggccaatgtgttgtggtcgccaccatgtgctgtgtcttcgaggtagcacttacagcccgagtttccactttcatttatagtgaccccagttgtctattttgttctttagtcaatgttaatggtctctgcttttttttttttttttttgggggggggacagagtcttgctccgtcacccaggctggagagcaatggcgcgagctcggctccctgcaacctccgcctcccaggttcaagtgattctcctgcttcagcctcccgagtagttgggattacaggcgcccgctaccacacccggctaatttttgtatttttagtagagacggggtttcaccaggttggccaggctggtggtctctgctttaaaaaaaaaaaaaaatgccaggtgcggtggctcaggcttgtaatcccagcacttttggaagacaaggcaggaggatggcttgagtccaggagttcgagaccagcctggacaacatggcaaaaccccatctctacaaaaaaatacaaaaattagctgggtgtgctcgtgcatgcctgtagtcctagctgctcaggaggctgaggcaggaggatcgcttgaccccaggaggcagaggttgtagtgagctgagattacaccactgcactccagcctggggaacagagggagaccctctctcaaaaaaaaaaaaaaaaaagccaagtctcagactttcatatggcttccatgctagtaggattgttacctgcctaatatctttagcaaagttactattttataactttaaaaatcaaacagacttcttagagtaggaatagctttaaaaatgaaaatattctaaatggactttagtgtttttcagatattgaaaattgaatacatatctgaaacctttaaaagaaaagcatagtgctttggtttctaatagttccttattttatcaggtatttgaattaccctgcaagactcaggagattcagaggtcttaaggagtgtctaggctagcttcctgtagacttcatagtatgacctgtgaccatcacttgatttggttttaactaggtggatgttcattctgtttgtttcgagttaaggaaaagaaaaagtcctttattatttaacatatttggctagtcctgcaacaaaaagaaaatgtcacatttgatgagtttttgttttaaactgaggggactttaatacatatggcagccaaatttacatttttgatcttttttttattatacttttaagttttagggtacatgtgcacaacgtgcaggttagttacatatgtatacatgtgccatgttggtgtgctgcacccattaactcatcatttaaccttaggtatatctcctaatgctatccctcccccctcccccccatttttgatcttttatactaatgaatgtgaagtgcttatgtaaatatttttattgacagttctgttttacttttaagaaattttagtagatgcattgtactcattaaaaaaatctttgagttgtgacaaaaaatatcataatgtatctttttggaagcactttcagaagtcatgcctagtatcttactgagttgcaggtgaatttgtaatgtttttgggtaatgtaagagctgtttgcatcttatctcacctctcctgtgtatttttcatttacagccttgggacaataatgcagtctgtgcagacccctgctccctgatccccacacctgacaaagaagatgatgaccgggtttacccaaactcaacgtgcaagcctcggattattgcaccatccagaggctccccgctgcctgtactgaggtcagtgccgactctgccacatggcttccaggtctcttactccatgctcccctttatccctcatagcatggacgcattcttacccctttgtgggcctcatttttgttgtgtgttttgttgtagctgggcaaatagagaggaagtctggaaaatcatgttaaacaaggaaaagacatacttaagggatcagcactttcttgagcaacaccctcttctgcagccaaaaatgcgagcaattcttctggattggttaatggaggtgagcttgagtcttcctgttcgcttcatgaaagcactgagcatttccagcatttttgtgtattaggacctctgtgtggtttattccctcgacatgttctccatctctgaagctatatggtatatttttactgtggtggtctttctgttttgcttgtattcttagcaagaatttctgaaatctttttatccttcagatgttttaaaattggcatctaattttttccatccaagtttaaataattgttaagattgtattttccagtaaattgtaactgttaacatttgagctttgttcattatgttcattaaattgctttttttttttttttttttttgagatggagtcttgctttgtcacccaggctggagtgcagtggcacaatctcagctcactgcaacctctgcctcacgggttcaagtgactttcctggcctcagcctcctgagtagctgggattacaggcgcacgccatcacgcccagtattttttttttttttttttgagacggagtcttgctctgtcacccaggctagagtgcagtggtgcgatctcagcttactgcaagctcctcctcccgggttcatgccattctcctgcctcagcctcccgagtagctgggactacaggcgcccgccaccacgtctggctaattttttgtatttttagtagaaatggggtttcaccgtgttagccaggatggtctcgatctcctgacctcgtggtttgcccgccttggcctcccaaagtgctgagattacaggcgtgagccaccgcaccctgcctaatttttgtatttttagaagaaacggggtttcaccatgttggccaggctggtcttgaactcctgaccttgtgatccacccacctcggcctcccagaatgctgggattacaggtgtgagccaccatgcccagctaaattgcttttaaatgtattcactgggatgcatatatcacctgttttatagctactgtcataaattgtaaacatatatgaacaagcttatcttaaacaggtctgacattgctcctttttaacttcttggaatccattcccttttccaccattcccatttattctaataaaatatattgttcaaatcctggctgggcacagtggctcatgtctgtaatcccagcactttggaaggccaaggcagaaggatcccttgagcccaggagttagagactagcctgggcaacatagcgagaccccatgtcttttttttttttttttgagacggagtttcgctcttgttgcccaggctggcatgcaatggtgtgatcttggctcaccacaacctctgcctcccgggttcaagcgattttcttgcctcaggctcccgagtagctgggattacaggcatacgccaccacgcccggctaattttgtatttttagtagagacggggtttcctccatgttggtcaggctggtcttgaagtcccgacctcaggtgatccgcccgccttggcctcccaaagtgctgggattacaggcgtgagccactgcgcctggcccttgagaccccatttcaacaaaaaataaaaaattgtcagggtatagtggctcaggcttgtagtcacaactactggggaggctgaagtgggaggattgcttgagcctgggagttggagcttgcagtgagctgtgatagcgccactgcactccagcctaggtgaccatgagactctgtctcaattttttttttaagcatatttttaaagatatttggaccattggagtggcttctgtgttttgagacagagttgctctgtcacccaagctggagtgtagtggtgcagtcacggctcactgcaggctccaattcctgggctcaagcagtcctcccacctcagcctccgcagtccttgggactacaggcatgagccactactccctgccgattttttattttttgttgagttggggtcttgctatgttgccccggctggtctccaactcctgggatcaagggatccccatgccttggcctcccaaagtgctgggattgcaggtgtgagctacagcacccaactcaaatcttttcttggtccacactattttatttctctttaacagttaatcaaaagaacaagtataacaacatttgatagataatggttaaacataaaagatgagattttattggttgtatatcttactgggatgaactgcggtagcttatagtttcttgattaagggaagcttcctagacaaccttgtaagacttgaatgggtgagaagtgggcttttcttctgaagtggaaggacatctcaggcagacctgcttcatgaaaacatgtagaagttgagtgtgtaactacagaagtacccctcatcctcgggggtacatcccaagacccgcaggagatgcctgaagccacagatagtactgagctctagatatgccatgtttttaatcctctactttcatgttttcacttaaagaaagcacttcacggcttctctttggcatttccaaatagccagcatcactactcttgccctgtggggccattattcagtcaaataagggctgcttgcttgaacaccagcactgctgtgctgtgacagtccatctgatgacctgtgtgctagtgagtgactaacaggcaggtggcctactccacggggatgtgcgggcaaggggatgattcacatcctaggcaggtgagggtgggacaggccagaagggcccctcatttaaaacctatcagttgttaggctgggcacagtggctcatccctataatcccagcactttgggaggccgaagcaggtggatcacttgaggccgggagttcaaaaccagcctggccaacgtggtgaaataccatttctactaaaaatacaaaaattagctgggcatggtggcgggtgctggtaattccagctactcgggaggctgaagcaagagaatcgcttgagcctggaagttggaggttgcagtgaaccaagatcacaacactactttccagactgggtgacagaataaggcacctcaaaaaaaaaacaaaaaaacaaaaaactatcaattgttgagttcaggaactttgcattttatattttccttcaccaaagtcattacaagttttttttttttcccctccctcaagtaaaacttacttgtgctaaaacttactaaatatgttttcaggtgtgtgaagtctataaacttcacagggagaccttttacttggcacaagatttctttgaccggtatatggcgacacaagaaaatgttgtaaaaactcttttacagcttattgggatttcatctttatttattgcagccaaacttgaggtaaataattttcaaatatttgttctataatgtgtgttatttctcgagctccactgagattgggggaagaggttggcgcttagcctatagcactcatcctaaatttttctgatttgctaccctgtaaagttaagacacatgccaaaaagaaaaaaaggctggaaagtgaccaggaagagaaaagtagtgagggtatggaagacctaggttcatgtagttacattgagccaaaaaaaaaaatgaactttgaactaagataataattttgggcccgggttggtggctcaagcctataatcccagcactttgggaggccaaggcagctgggtcacttgaggccagtagtttgagacatggtgaaataccatttgtactaaaaatacaaaaaattagccaggcgtggtggcacgtgcctgtaatcccagctattcgggaggctgaggcaagagaattgctggagcccaggtggccgaggttgcagtgagtcgagatcctaccactgcactccagcctgggcaacagagggaaattctgtctaaaagaaaaaagaaaagattaaaaatttgtgtatgattatcaaagggtatatgggcccaactttcaaatgtgttaaaggtactgaaaaggggatatttcaagagtacccacaatgagtcaaagttccatccatttatttaatggtgggtgggagttgtgttcttttttttttttttttttttttttacaaccattggtgtggcttctgtgttaattccatcagtgcgccctctctctttccatgccagggtactgagaagtcattttggatgcattataaattgagactgttagagattggctttggtgctagtgccatcttttatttcctttcaggaaatctatcctccaaagttgcaccagtttgcgtatgtgacagatggagcttgttcaggagatgaaattctcaccatggaattaatgattatgaaggtgggttccagtgaattttccggccattttttaaatgcgtacggcagatcttttccacctgaagtgtgagtgcctctgggaggtgttctccagctggacacattgtggcatggaacatggctgcattttgaacttcttttctcaatcatcggtctcttttctctctgttttcctttaggcccttaagtggcgtttaagtcccctgactattgtgtcctggctgaatgtatacatgcaggttgcatatctaaatgacttacatgaagtgctactgccgcagtatccccagcaaatctttatacagattgcagaggtaagtggctccatcacgtccgtggggccaccttccctgcagctggagtgaggaactctagaataggcgtgtggtggcatccatctcagcgttcttttcttctccgtagctgttggatctctgtgtcctggatgttgactgccttgaatttccttatggtatacttgctgcttcggccttgtatcatttctcgtcatctgaattgatgcaaaaggtttcaggtaagttggctttccagtgcatgcacaaacaaggtgtactaagcttacatccagttgtcagcctcagattaagcccacgatgtcttcactgcagggtatcagtggtgcgacatagagaactgtgtcaagtggatggttccatttgccatggttataagggagacggggagctcaaaactgaagcacttcaggggcgtcgctgatgaagatgcacacaacatacagacccacagagacagcttggatttgctggtcagtgctgctccttctttcagtccttcttggccaaattcttaaaactgcctaaataggccagccgcggtggttcaggcctgtaaacccagcactttgggaggccgaggtgggccgatcacttgaggccaggagttcaagaccagcctggccaacatggtgaaaccttgtctctactaaaaataaaaaaattagccggctatggtggtgggcacctgtagtcccagctactcgagaggctaaggcaggagaatcatctgaacccgggaggcggaggttgcagtgcgttgagatcacgccactgcactccagcctgggcaacagagcgaaactatgtctcaaaaaaaaaaaaactgcctaaataacctgttcacttttcttcaggcaggccccaaatatccttgaaaaactccaattttaattaattgaaaaagaaaaatcctggcaaattgatgctgtatctcactatcatatagactatagagttttaaagtgctctttgatatttttttttctttcactcacctccgtagaaaaagacatagtggccagacacagtggcttttggaggccaaggcagaaggactgcttaagctcagaagtttgagactagcctggacaacatagggagaccctgtccctaaaaaatttaaaaactagccaggcatggtggcacatgtctgtagtcccagcactttgggaggcggaggcgggcagatcgcctgatatcaggagttcaagactagccaggccaaaatggcgaaaccctgtctctatgaaaaatacaaaaattagctggacatggtggcgggtgcctataatctcagctactctacttgggaggctgaggcgggagaatcggttgaaccctggaagtggaagttgcagtaagccgagatcccaccactgtactacagtctggatgagaaagcaagtctccatcttgagaaaaaaaaaaaatttaaaaattaaaaaagaaaaagcctatggtaattgaagcccaaggatatgttctactctaatgtgttgtcccttttattcttaccaacaggacaaagcccgagcaaagaaagccatgttgtctgaacaaaatagggcttctcctctccccagtgggctcctcaccccgccacagagcggtaagaagcagagcagcgggccggaaatggcgtgaccaccccatccttctccaccaaagacagttgcgcgcctgctccacgttctcttctgtctgttgcagcggaggcgtgcgtttgcttttacagatatctgaatggaagagtgtttcttccacaacagaagtatttctgtggatggcatcaaacagggcaaagtgttttttattgaatgcttataggttttttttaaataagtgggtcaagtacaccagccacctccagacaccagtgcgtgctcccgatgctgctatggaaggtgctacttgacctaagggactcccacaacaacaaaagcttgaagctgtggagggccacggtggcgtggctctcctcgcaggtgttctgggctccgttgtaccaagtggagcaggtggttgcgggcaagcgttgtgcagagcccatagccagctgggcagggggctgccctctccacattatcagttgacagtgtacaatgcctttgatgaactgttttgtaagtgctgctatatctatccattttttaataaagataatactgtttttgagacagctggttttatgagctatgtctggtaacttaaggtagcagtcagctttaattgtggttatatcaacttctgttttttgacttcatacttcttgaggctcaagtctttcttttttttttttttttttttttttttttttgagacagggacagggtctcgctctgtcaccaaggctggagtgcaggggcacaatcttggctcactgcagcctctgcctcccgggtttaagcgattctcctgcctcagcctcctaagtagctgggactacaggcgtgtgccaccacacccagctaatttttgtatttttagtggagatggggttttgccatgttggccaggctggtctcaaactcctgacctcaggtgatctgcccatctcagccttccaaagtgctgggattacaggtgtgagccaccacacccagccttgagtcttaactcttttggtcaaatacatttttcaatgtatttgatggaaaggaaactttagacgtgggcttcaggtgcagcctgtctgcctcctggtgccccctgagctggaagtgaggagtccacctggtatttgtctcaccacgccctgcactggtggctgctcacaccaggtttgttggccatcagtagtagtagtgatgaggtaatgtccacaccgaagaggattcctaggtgtaacttccttcctaggactggttaaaggccataaggaatctggaattagcatgatttaatgcttttttttttttccccttaccgaaatcttagcctaaagaataagtgaatttttatttggagaacttttaacatagtagcctaaaactgcttttaagaagaaaatgaggctgggtgcggtggctcatgcctgtaatcctagcactttgggaggccaaggtgggcggatcacaaggtcaggaaatcgagaccatcctggctaacagtgaaactccgtctctactaaaaatagaaaaattagccaggcatggtggcgggcacctgtagtcccagctacctaggaggctgaggcaggagaatggcatgaacccaggaggcggagcttgcagtgtgctgagatcgcgccaccactccagcctgggcaacagagcgagactgtctcaaaaaaaaaaaaaaggaaaagaagaaaatgtggctgggcgtgtggctcacgcttgtaatcctagcactttgggaggctgagttgggcagatcacttgaggtcaggagttggagaccagcctacccaacatggtgaaaccccatctgtagtaaaaatgcaaaaattaaggctgggcatggtggttcacgcctgtaatcccagcactttgggacccaaggcaggcagatcacctgaggttgggaattcaagaccagcctgaccaacatggaaaaaccccatctctactaaaaatacaaaattagctgggtgtagtggcacatgtttataatcccagctactcgggaggctgaggcaggagaatcccttgaacccgggaggcagaggttgcagtgagccgagattgcaccactgcactccagcctgggcaacaagagcaaaactccatctcaaaaaaaaagaaaagaaaagaaaattagccaggcgtggtggcacacatctgtaatcccagctagtggggtggctgaggcaggagaatcacttgaaccaggaggcagcagttgcagtgagccgagatcgtgccactgcactccagcctgggtgacggagtgagactctatctcataaaaaaaaaaaaaaaaaaaaaaagtcagggcgcagtggctcacgcctgtaatcccagcactttgggaggccgaggtgggcggatcacctgaggttgggagtacaaaacaagcctgaccaacatggagaaaccccatttctactaaaaatacaaaaaaaaaaaaaaaaattagccaggtgtggtggcacatgcttataatcctagctactcgtgaggctgaggcaggagaatcgcttgaatctgggaggcggaggttgcggtgagctgagatcgcatcattgcactccagtctgggcaacaagagcaaaactccatctcaaaaaaaaaaaaaaaaatgcgaagtagagtcatatgtcagctgagcgcatgatgcagcctgttcgctgagcactgatggagtcaccaagtgccttgctaatcattgctgcccacttacaggcctcgtgtacagctcatgtgacctttgtttttgtacttttagtagagacggcggttcaccatgttggccaggctggtctcgaactcctgacctcgtgatctgcccacctcagcctcccaaagtgttgggattacaggcgtgagccaccacgtctggccgctcacatgattttttttttttttttttttttttttgagagggagtctcgctctgtcacctaggctggagtgcagtggcacaatcttggctcaccgcaacctccaccttccccctgttcaagattctcccacctaagtctcccaagtagctgagattacaggtgcccgccaccacacccggctgatttttgtatttttagtagagatggggtttcatcatgttggccaggctggtcttgaactcctgacctcaggtgatctgcctgcctcggcctcccaaagtgctgggattgcaggcgtgagccaccgcatccggccactcacatgactttttactgaacattcttcaaatggtggtcttttggagtcttgtgtttgactaacagtgcttcatcacgtgtgctagtgcatacaaggaagggtgaatgaacaaataaatactgcttattttcaacttggtattttatctcatttggcaaaaatctaaagaaaaaagcagccatttgaaattcgtaaccatacgcagtgagccaagatggcaccatggcagtacagtctgggcgacagagcaagattccatctcaaaaagaataaaataaaatctgtaaccatatttgtatgaagttggagagactttacttttgacattgatgtagttctggcagatttttttttttttttttttttttgagacggagtctcgctctgttgccaggctgaagtgcagtggcacaatctcggctcactgcaacctccacctaccaagttcaaggcattctccagcctcagcctcctgagtaggtgggactacaggcaggcgccaccacacccagctgattttgtatttttagtagagacggggtttctccatgttggccaggctggtctcgaactcctgacctcaggtgatcctccctcctcggcctcccaaagtgatgggattacaggcatgagcaattgcgccggcttttctggcaagttttatttatttatttatttatttttattttattttatttttttgagatggagtctcactttgtcacccaggttggagggcaatggcgcgatctcagctcactgtaacttctgcctcctgggttcaagcaattctcctgcctcagcctcctgagtagctgggactacaggcgcgtaccaccacacccggctaatttttgtatttttagtaaagacggggtttcaccatgttggccaggctggtctcgaactcctgaccttgtgatccgcccgcctcagcctcccaaagtgctgggattacaggtgtgagccaccgcacccggccctctggcaagttttaatactacagttatcctaataaacgcattgtaaatctacatgtaatggtatttagtcaaatgataggactagccagttatttcttcactttaggcagagatgttctagtcttaaaaagcagtgagtttttggctgggcgtggtggctcacacctgtaatccccacactttgggaggctgagttgggcagatcacttaaagccaggagcttgagacaagccttatctgcaacctttgcttcccaggttcaagtgattatcctgcctcagcctcctgagaagctgggattacaggcacctgcccatgcccggctaatttttttttgtatttttagtagagacggggtttcaccatgttggccaggctggtctcgaactccagaccttgggtaatccacctacctcagcctcccagagtgctgggattacaggcgtaagccaccttgcccggcctacatttagcattttcttttttttttttttttttggagatggagtctcactctgtcacccaggctggagtgcagtggcatgatctcggctcactgcaacctccgcctcccaggttcaagcgattctcctgccttagcctcccgagtagctgagactacaggcacccaccaccacgccctgctgatttttgtagttttagtagagagggggtttcaccatgttggccaggctggtctcgaactcctgacctcaggtgatccacctgccttggcctcccaaagtgctgggattacaggtgtgagccagtgtgcccggcctacatttggcattttgtaagcaaaaagatggcactaaaaaatttctatttccaaagtttcataaatttgagagcttgacacattgaggtaacagcaaatttgaaagtacgtttgaggctaggcacaatggctgaggcctgtaatcccagcatttagggagattcgaggtgggaggatcacttgaagtcaggagatcaagaccagcttggccaacatggtgaaacctcatttctactaaagtacaaaaaattagccaggtgtcgtgctgggcgcctgcagtcccagctactcaggaggctgaggcaggagaatcgcttgaacccagtaggcagacgttgtggtgagctgagatcatgccactgcactccagcctgggtgacacctaaaaaaaaacaaacacatttgaggtaaatattaattcataggtcatttagccacccaccgtattagagagggtgctagaatatgctgaaataagaatgccttatatgtaacttgttggaatgctgtgtttctggaagtcaaagctttttaagtggcagtgttgtcacaggcagctcttaattattggtgctaataaaggctaagtcctgaatgggtaaatgacatccatattaatcaatcatgtctatactcaggaaccctaagagctgctagtaagtagaaatcaaaattcccctgtaagaggagctttttccacttgctagtaatccctgctttggcctctctctcattggctgcaaataccccttgaccaagtcgcttatgttctgctattcagctaaagccagatgaggccacaagagacactggggtgaaaatggcagctcagtcaacttgggtgaacagatgtcctgaggagatgtgttagcaagaaggaccagagaaaggaggtgatgtggcccctgatctaactctcgggttagagatggagaaaaagcgagtgattcaccaaccctggagaccctgaactgtggttgagcagaccatatcctcatatcccgcctcagctcacagaattcacttgcggccaggcacagtggcttatgcctctagtcccagcactttgggaggccaaggtgggcagattgcctgagctcaggagttcaagaccggcctgggcaatatggcaaaactccatctctacaaaaaatttaaaaatttaaatttttttgtggtggcgcatgcctgtagtaccagctacccaggaggctgagatgggagaatcacctgagcctgggaggccgaggctgcagtgagccatgactgtgccactgcactccagcctaagcgtcagagtgagaccctgtctcccaaaaaagaattcacttgctagagtccgccagagttgttgtcatttctctgcccactgtgcctgacgacaacaacaacaaaaaaaccctggtcctcaggtggtgggagtcaagggttttccaatgccgtcttccctgtgtggaacacggacagcttactctttcatgatggttatttggtaccatgtgataaatacatgatgcagaggttcacactgacttttagtttctaaggcaggtagagccatggagccctttaagattcagagcatggcacccaatacgtgtccatcctctaactcagacacaaacgagattggagtttatttgggcaaaattaggctctagctctgagcagggctagagagagaaatcaaatctgataatgtctagtcatatttacccaaccgtgcattttcctaccacatgttccacattttgaaattcaaatcacatttataccttggacattgttagaagactatttttatccctgctgtaatcatctaatttgctgattacaggtctcaaattgccacagagaactcaatttttgaaagaattgtcctgtttgatcaaatatgttattcaagcaatgcagtcatttgttccacaagtttacctgccaggtagagttaaccaggagtaatagcattagaagcctatacttaaaatcaagcattagctaatccgcctgcgacaatagagtcttaaatataatttgctgcagatacttcagttcctgcaccgacagacaattgcagtctgtatccaatgagcacagattttttcctacctcgtcccaattccaaatttaacttcagaagactctaatgtactcagttgcataggcttaccaggtactctttcctgggagcctcacatgggagggcaacactatcctttattcaataaacagcatcccccaccttttaaatcattttcctgatcaatgccaattccaaaagttgtgtggtatctgattatgcagtgcggttcaagtcaaatgctggcttccttggggttggtgagtgaggtgccctcgatggagtccctgctaagtgtacactgccagtcctggagacatgaactcaagggagcctgggagaccggggaagccctggagtccccggagggcactggtatgaaatgaaaaggtggcactctaggagcagagcagcagcaggactcaagctcgggaggtggggctgtggaatgctctccagcagtcacaaaagccctcacaaatagggtagaggaaggccacatcacaaggggcttttgccgtcaactaagatgggtgtggtctcccccgcagcaggaagccggtgtttgtaagacaggagtgacttgctcagagccggtttggaggaagaggttgatgaacaagtacagagttatgtgtctttgtgccgtaagaaaatgactgtgcaagtcgggcgtggtggtgtgcacctgtaatcccagctattgggaggctgagatgggaagtatcgcttgagcccaggggtttgaggctgcagtgaggcatgatcacaccactgtactccagcctgtgcaacagaacgagaccctatctcaaaacaaacaaacaaaaaatcaaaaaagaaaatgaaaatgagtgtgtagtgtgtggaggacaagcaggcaggcaatgaggacattcgtaaaatcagctgcatcaccatcatttctaaatggcgctgcctgcatatctccccaggcccccgtgattctgctcctgtgcccctgcccaggcctctgcctacagtggctggaccccacctcctgcaggagtgcacccctgacgttggcccacactgatgtcatttcttcactgggttctggaggcagttgactcatgtgggaagccggctctgccacttcccagagtggtcttgggctctgtgcttcatttctccaagcttcgtgtttcccagctgtgacctgaggatgacaacatagtgcttcccccatggaaccgaggggagatgaaatgaggtcacgcatagatatgttgagcacagcgcttggcacattaaagagaaacagcaaatgacagctgatccctcttattgccaccactgggttcactgtcactgagctaggctgttctgtgaaggattgagcattctcttttctttttctttttctttttttgggacggagtctcgctctgtctcccaggctggagtgcagcggcatgatctcggcttactgcaacctctgcctcacgggttccagcgattctcctgcctcagcctcccgagtagctgggactacaggcgcccgccaccacgcccggctaattttttgtatttttagcagagacagggtttcactgtgttagccaggatggtctcgatctcctgacctcgtgatccacccgcctcagcctcccaaagtgctgggattacaggcgtgagccaccgcgccgggcaatttttgtatttttaatagagaacggggtttcgccatgttggccaggctgggctcgaactcctgaccttaggtgatccgcccacctcagcctcccaaagtgatgggattacaggcataagccaccatgcctggccaagcattttcttttttaagagagagggtcttgctctgtcatcaggttggagtgccgtggcacaatcatagctcactgcagcctcgacctcctagacccaagagatcctcccgcctcagcttccagagtagctgggactacaggtgcacaccaccatgccctactagttttaagttttttttgtagagatgggggaatctcactatgtggcccaggcacgccttgaactcctggcctccagtggtcctcccgccttggccacccaaaatgctgtggctacaggcgtgagccactgtgcccggctgagtttagcactggggacgtgttctagccctacagacagccctggtagggcactgaggtggggacttaccggctgccctgtgtgccttgcgcagcccagggcacagcagtgaggactccaggaatgcctgggagcttgtgcaagcgagcccttagcctccttagcctctccccttgggcccgcccctgtgtcttctccaggcttccacccccctccctctcccaacttcccaacttgtcttccttctgttttttgttttttgtttttttttgagatggagtctcactctgtcacccaggctggagtgcagtggcataatctcagctcactccaacctccacctctcaggttgaagccattctcccccacgtagctgggactataggcacacaccaccgcgcccagctaatttttgtatttttagtagagacggagtttcatcatgttggtcaggctggtctcgaactcctgacgtcaagtgatctgcctgcctcagcctcccaaagtgttgggattacggtgtgagccatcgcacccagccgccacttcttttcctgggcagcccctttgaaagtgtcatctacactcactgtcactccctcttggaccctctccagttggcgtcgccacaccacacagtgccctcaacaaggccacctaagacctctgtgggacaaatctcacagtatgcgtctgccttcctctcccaaggcacctctgccacacttcgctctgctgacccctctttccctctggaaacttcagtgccagctcccccccgcccccacgcaccaagcatcatccctcccaggcagctcctctctgctccagcataaggtggaggacccgcagattcatcccggccaccgccgcccccttgacatttgtccctgggcaacctcaccacctggaagactttgccactgcctctgtgccggcctcacccaagcagggggtctctaccccaatgaggcctgccctggctgcacacctgaatgcccacttgcctgcagggggcctccacctgcgcccttcaccaccttctagaaaaactccttatttcaccttccattgttcatgctattacgaaaaatgggaactggcaatacacaatcaacatgaaggtgactcaatccgcaagtcatcggggaaatgcaaaataaaacaatgagataatttcacagccaccaggttggcaaaaattttaaagtacaaagaacaatacaaatgaatagctgtggatccatcatccatatttgcctacttggcttcatatcatgttttaaagaagaaatacaacatttgagtatgcagcagtttgtcaaaagaaaaaaactaaaaaaggaaatacaatattgtagacatagatgaagatcccctcatgttcctcctcagctgaaacaactccccaaggtggatgtatatgatgcccatacatatttttagacttttaccatttatttttggatccagaagcaataaatagacttatagcaaatactgctttgggtgtttaaaaaattacctacatttggtggaaggaagaaaaagaaatagtaaaaaaacaaaaaaagaaaaaaagaaaataagtggaatcaaactttacatatcacaatatcacttgctattttctttcaatgttattttcttttctttctttctttcttttttttttttttttcttttttgacatagagtctcgccctgttgcctaggctggagtgcagtggcgcaatctcagctcattgcaacctccacctaccaggttcaagtgattctcctgcctcagcctcctgagtagctgggactacaggtgcccaccatcatgcccagctaatttttgtatttttagtggagacggggttttgctatgttggccaggctggcctcgaactctttacctcaggtgatctgcttgcctcagtctcccaaaatgctgggattacaggtgtgagccaccgtgcctggcctcagtgttattttcaagatttacctatgttgatccacgtagggttgagtttattcttttgaaatggtggtagaattttcccctgtgtgaatgttccacaatagatatgctccctgccaccctggtccacaagtaggtttctgattttttcaccatcacaaacagtgttgcaattggcatcttgtgcacattggtgccacttacctggattcctttagggcacattcctagatgtaggattgccacgtcaaagggcgtgtgcctgtgcaccttaactagatgtggtcagtgacttcctcaaactgcaccaatctccgcttcccgccagggagtgtgagagctcctgcctctccacccttgctccagtactcagtatcgtcaacttctcttcccattaaaattgctagtatttaactttattggtttttctctggctatgaaagtaaagcttgtttgttataataaatcagaatactacaaacacgtacaacatagaaactgatgattccccagagatgccgttcttaagagttggagtgttaaaacagtgtacattgctctagaattcttttcaatgcacacgctaacacatgagtgaatgaaaatatttgctgtttttctacagggcggtttcattcagttatatcatcactaagtagtttaaaatgcatatgcacatacaaactcactccttttctgttgttatttctcagtgatgacttgccaattgattccattgccttcctggcacaaaatagctgctcagtaaatacctgctccatggatggatggatggatggatggatggatggacggacgcacggatggacggacagacagacggatggattgatggacgaacggacggatggatggattcttacatttatagccactttcttacattttcatgcccaggagactatagactatcttctacttgcaaaagaccaaaagattgcataagattagaaagcgagacattaacagaaattaatcaagcccctgtccaggttctagtccttttttgagcaaaggtgccatacaccacggaatcccagttcctggcggggttaccgggggcatggcatccaacagcccagtctgcaatgcaccattagacacacagacaaatccatcccctctactttggggcagcactgtgatgaaccatccttgggatactgtcccttttttaaaaggaaaaaaatccaaagttagtatgttccagcagtcacagcctgagtcatccatccagaaagctctctgtgctcctcttgctaagcccctgagttatctcttgttatagacaagtaatgaacatccaagctctgtaagatggttacttggtctgaagcattccctccttcttaaaaaaaaaaagttttatttattttattttttacatctcttattatttatttatttattttttggtagagatgggctctcactatgtggcccaggctggtcttgaactcctggcctcaaatgatcctcctgcctcagcctcccaaagtgctgggattacaggtatgagccaccatacccagtcagaagggttgcctttgaagttctgcatcttccatccctcttctaagctgtaggggattcgccccagcattcagggctaatgtagaggctgcacgttggggcctgcaggtcaggtgggttgtgctggggctgccgagtcatttcaaaacacttgaggcaatattgaaaacctggaaagttcacattcagatacagctccccagctctgggcagccctgcaggcagggcatgtggtctgcaatataccagaatcctcaccacctctaccacaccctacgctaaggtctcagactccattgctgtttaccttcacaaacgcactgcacatcttcttggagtagacaaatatttcttgtaactgtgactatcaaaagtgagaaaacagctttgagtgcagtggcccacatctgtaatcccagcactttgggaggctgatgcaggaggatcacttaaggacaggagttcaagaccagcctggacaacatagtgagacactgtctctacaaaaaaattaaaaattagccgggcatgatgactcatatctgtaatcccagcactttggtaggccgaggagggcggatcattagagcccaggagttcgagaccagcctaggtgacatagcaagaccccgtgtctttaaaaaacaaaacaaaagtgagaaaactgtgtagatcaagaaggtggagtgtttcaagaagaatggcagagagggaacatttcttctagaaatgcagactacttgagcatgtttaatattcaatacaaagatgtcttggtgtccaaagacatcttcttttatgggcctggctcccataggcacctgagtttgagattcctggatttataggagtctcggctctgaccccaaggtcctgtggggctttcagcttgtcccttacttactatgggcctcaatttcctcatctgcccaatgaacaccatctctactaaaaatacaaaaattatctgggcatggtggtgcgtgcctataatccagcaactcaggaggctgaggcaggagaatcacttgaacccaggaagtcagaggttgcagtgagctgagatctcaccactgtactctagcctggcgacagagtgagactctgtctcaaaaaaaaaagttgctttctgtttctcttccaactcttgtcttccaggtggtgatggaagactagtttggggatgttttcaggtttgcaatcatacttcagggaactcccctgcttcctgtcatgcaaaggagctttcatttctctagatgtcagggtgggtgggtgtgagagagacagtgggcaggaccaaagtcaaactagcaagcaggtgggcgagaagctgccaggggcagagagaagcccgcagcctccaccccacaccttacttctattccctaggcctcctggtgatccctgaggtgacctttggccctcagtccctctaaggcacatcaaggccggaggtgaggcaggtgtgattccagggccgctgccgggaaatagttcccccacacccatcaaagcctggtgcctgaaaggtaactggttgtctggtggctctggagagagagatccaaggtgggaaggcgctcaggcctcccaaaaaagcttccagcactgaggcggactttgctcttccttgaagggaaccctgcactgtgctcccgggaaaccccctctctgattccaccactgtgatggagaaaactgaggctgcagaagaaaaattgcagctgcagaagatgagtgtacagatcccaggagtgatttttccacactgttcatctccgtgctatccagggcagctgaaaaggatggctcatctgcggcttgagatagatgcagacgtcaataaggaattcacggaaacacaaaaggcgggctgggtggcttttattaattatatttcttctatcttcaaaacaataacacatcagtaatctacgttgaatgagcccaattgatgccaatgatttctttttttctttctccttttttttttttttttttttgtgagacaggttcttggtctgtcgtcaaggctggagtgcagtggcacgatctcagctcactgcaacctccacctcccgggttcaagtgattctcatgtctcagcctcctgagtagctgggattacaggcacccgccaccacacccagctaatttttgtattgttagtagagacagggtttcaccatgttggccaggctggtctcgaactcctgacctcaggtgattcacctgcctcagcctcccaaagtgcagggattacaggcgtgagccaccatgtccagcagtgatgccaatgattttatccttttgtttctgttggagggaaaaaagaaaaaaggtctgtctgcccaagctagtcagccctcgcatgagcctggagatcagcaaagccctagaagcccttaccagggccccctcactgccatttttgcatcctggctctccctggcaatgcccacagcagtcctgcctggcagtgcccatctgctgtgtccccagccaccgtcccctctcctgcgttcttctttgctatagtcccacgtagaggagttctgacctcagtattgagtcctctctttgggtggaggtagaggcagggtatgtgtgtattgggggtctggggggcagtgtttagaaactgaggacccctcttggtgcacctcaaatcacattcctcacctaacggttatttctgaagaaagaaaagaaataatcggttctagattgctttcttcctacaatccttatctattatcattagatttcactgtttggcacacattagaaaagggtatgtgtacggtggggcacacagcaacggctgaaagactcacagattatttgcccgcttctgtcatcactctccacccccagatcctagggtgaactgtcagggatggcatcgaacagtttccaaacttaaatgtgctaaacctcagtatcctttcctcctcctcctccgtgccaccccagaacaggcggtggctgcacatctggcccaggaaagaggcactgagaaaagcattcaggcaatatacaaatgagagagacaggtgcatacacctgacatttgttattatttggatacaaacgtcattagcatgtgagcttcaaacagccgctaaagtctgggctctgtgcagcctccgcacctagatttcaccaaaaggcgctttcagaatggggttgggatgacctttcctggacccacttcaccaggtagccctggtttgtgaaaatgacctagataaggctgggcgcagtggctcacgcctgtaatctcagaattttgggaggccaacgtgggtggatcacttgaggccaggagttcgagactaggctggccaacatggtgaaaccccgtgtctactaaaaatacaaaaattagctgggcatgatggcacacgcctgtagtcccagctacttgggaggctgaggcaggaaaatcgcttgaatctgggaggtggaaattgcagtaagctgagatcgtgccactgcactccagcctgggtgacagagtgagactctgtctcaaagaaaaaaaaatgtcctaatggggtcccaactcagccacctccacctgcaactcaggcagttctggaatttccatgcagggggctcgagggtgacctgcaattaaaaatgggggtcacaggcagatacccaggatgagtctgcaactgtgtgttgactgagataatttggagcgaaccaatggcgacaacagagggtgtcagagtcccccctacccccatctcccgcactgccaaccttcttctcttccttcttctcctcaacccccactgggctttctgccctccagaccacctcctcccagacactaggggctgatttgcacagctggtggtcgaggcccctcctggcatccttggtggatccaacactgagtaaagttgccgaggcgagtagcgatgctctggtggaaggctccacatgcacattcaccccgaacagctgctggaaactggcacactctgctgctgtagaaattatcagcactgccacctcagctcctggagaaagtctcggtgtgacagcctgcaaagtaatcctgcatttgaatttcactgacaaatcctggcttcctccagacaagctccaacctgcacagatggcccctcgcatcaaaaagtaaaaataacaaagcttgcaattctgggcctccctttttctctgggcagatgtgctggctgcacatttcgggaatcgcgcggtctgagttccagcagcaacctctctcctcctgtacgctcgcactcgccccttctggcgtgctgctggggagcggccgtggcccctccgagtgtgttcagggaagtgtctgggatgcctgagccttttgagtgggagagaaagacccagaggggagagagtgtgaaaattcatcccccactcaagattagccatgttgtcatccataagacagctggcccagggaaggggttgcagcgttggagaaaggtctcaggtaaggtggtcagcagaggtgggggatgaggggcggctgcgctaagggccagccagtgcatgccaagtgcaggcggcagagtgggagatgaagctctagaagtttctgattttttgcttttttttccccaatcagatgcatcagaaggactgattttcttgcccaggctcatcctgaactcctggctcaagcaattctgtcaccttggcctcccaaaatgctgcgtttacaggcgtgtgctcctgatttttttgaatcccccaaaccttgaccagccacagaattctctccactcatatttgctgagaacctctggggatatccaggccctagggatatggttatggatgagacagacccagagagcacaggctcagggaacacacagccaaggccatctgtgagctgggtggccacagactcactgctcaggaatgccagagcaggaggccaagggagaggccagagacagggacctgcagctggcgacattgcgggagccacttacccgcaggtaggtttcacctttgatgagccatctgacctggagccaccaaggctcatccagaaatggtggctaaagtctttgctctactagagggtcagatgagataagatgttcagctgcaaggaaaagacaactcaaagtgccaggagaaaacaaggaattcatggattcgtatgaatgtatggattcaaacgaatggcccaggggcctatctagcctcaggcatggctggatcagggtgtttacattgctgtcctcaggaatccttgcctcagctctgaaagctgactgtgccgactttgttctccacgtggcatttgccagtagagaacagtgtctccaggcagatattcctcccagcaagtacctcctacccagactctccagcaaaagtcctggggatgcttctcattggtccagcttgggtcacatgcccatcccttctctaatcactgtggccagaggaatgcagtgctgtgattagccaggcatgtgtcaggtgtcagtctctggggcagagttggaataggtccatctgaactacctggctctgcagaaaaggggaagggatgctgggttggcaaaagcagcaagtacagaaacaataaagactctcccaaagcatgggtgactgcagagatgggagcatgctctggaacagctgcaaaaatcctgcttcccacagcaggattcttcttgctgcagttgtgtggccactgtcattcatcccctcagcgtctctaattccagcgtgctggcctctgtgccaggcccgggatatggggaaggttccgcatgaccgtgtggggaagcctgcctgccacctggcctcaggggtgggagcagccccctggggacttttcgcagttgaggtctgcctcacccctaaggcccctagtttccctctctggtgtctcttagatctccctgtgtttggatttccattttcctcttccttaaaccaacaccgtaaggtccaaccttcaggaccctgaccctggagagaaaaaaacagagaccaggaaggtcttcactagccaaagccccaggtctgggcttctcatgcacaaagcctctgtctgccacccacaaacccattcggggtagagttgccctcttgtagtggaataaaggacaagtgtggccaaacttgtttggctcttggtcctgggccgggggtggaggggagaaaacaggcattatcagagaagggcatgctgaggctggccagggggtatgtgaactgggagggggccagctggggagctcagcttccaggcccccacccaggcctatgtcgctgctctgatgtgtctcagtgagtgcaccgggcaagacgctgtttgaaggagcttccgtggaaacatccataaaactaaccttgagggaagaactgccgccctggctttactcctgtttagtcatttcattttctcacaatcctatggggtgggaatgatcactggccccattttagagaagaggaaactgagaaacagggaggtcctgcaacttgcccaaggtcccgcaacttgcgcaaggtcccacatggggcctggcttcagggcctgtgacaagacactgcatgagaagcccggggctggttgataggacttctcattaaccagctcataggactcccaaaatccaactgagggttggggcccagtcatcagcttttggggtttctggccctggggtggccctggccacataggcctgcatagggcatgcgttgccccgctgaagctcggcagcttagctcttctgccgggacaagcgcttcctaggaattctgagcacttctgccccctcccaggggcccctcccaggcctcctccgccgccagtccgggctgacagcttggctggccccaggctggggccgactctgaatgcggcgcctcctggtcacgcggcatgggcagaggaggaggaggaaaagggagaggaagaggaggaggggagaggagggaggccggcctgggtagaagtcagctccagctcctggaaggagcccacgcgtgctctagacgccttccctgcacggggctctgcccatcccccacctctgggaggagacagggtggccccggaggagggggcggcagtccggtgagcagcgacttggggcccgaggccccggccagttccattctcaccacgcccggcggaagctatcgccacgatttggggagggccgcctctgagcctcctctggaggcggcacctctgctactccattgcacaaacggggaaaccagccccgccgagcgtaccaggccaggccggccctgaggggcaggggcaggacgccaggagctgacccccagcgtccccgactgccagtgcccctgtcatgcaggccgaggccaaagcacgaaggggcctcgctgcaaaaggtcggacctgcgttgcaccggtttccagccaagtgctttgggcaagtttcttaaccgccttggcctccactttccccttctgtgaaataggatggtgcccacctgacagggttatcatgttcccttgggcagggcctggcaggctgagccaacgtcagtgtttgcgtggctagtttggttttattttttacgtattgttttggagacaaggtctctgtcacccaggctgcagtgcagtggtgcgatcagcgctcactgcagcttcgaactcccaagctcaagcgatcctcccacctcagcctcccaagtagctgggattacaggtgggcaccatcacacccagcaacattttttattattttttgtaccaatgagatctcctgtgttgctcaggctggtctggaacccctggccaacagcgatcctcctgccttggcctcccacagcgctggcctattaacgttttaacagaatgaactgaggctcagctgggccaacgcggaccccggcctgcgcccacgcctcaccggctccccagggcctgggaccggcacagcccgggctcaagggctgggactgccgccccgccctagagctcaggctgcgctccacgtgcgccgtgtttacccacgtgatgcgctgccccgccccgccccgccccgcgtctccccgccccgcgtctcccgcgccgcgcgtctgcagcctggccaaggcggatgctgggggttgggggcccgagcgcggcctcacgtcgcccggacgccccccgccccacccgggagactggagcgagccacggcctccctgggcgggcttggcccagccactccgctgtgtccgcgctgccagggcgcgggagcacttccgggcgcgcgccgcgggaggggcagggccgaagaggtgggggcggggccgaagagttaggggcggggccggagaggtaggggcggggccggagaggtaggggcggggccggagaggtaggggcggggccgccccttgcgggggggttctgagcggcccgcaccgcaaaaggcggtgtcagggcggtgaggggcggggcctggcaatgcacaggggctcttaggggcccgcactgcgggaggggcagggccagggcggttggtggactgggcctggctgtacgtaggtgctctgagaagcccccggcgagaggggcggggccagagcaacagtgggcggggacaggctgtgcgtcggagctccgcggggcctgcggcggggtgggtggggccagggcggcggtgggcgggccgtgctgtgcgtaggggcgctgagaggcccgcaatgtgagaggggcggggccggaacagcggtggacggggtctgtagttcaactgtgccgtggcgtcttcttcgcggcgagatctgagtgcctcgcagcagccgaaggcgggtttgcaggttgcgttgcgctggccctgccctcggcaggcagaacgggatagagcgcggacaggcgccgtcactcccagattcctctgcgtccatggcagagccactcctccttggtactccttccttgacccaccggggcccccttcctgctgtctctgcccctctagctgctgcctccaggggcttaggtctcggcccctttggcttctgggctgcccctggcagatctcgtccatcctaggttttaacgcctacctgcatgcggatgatcctgatagttctaacagtagctaaactgttttccacgtgctttctgaacattgatgctgtttggacccctgacagccacatttttacgcccccgcgcagcccgctgctctgagctccgtattccccgccggccgggtgttccacggcccttctgagtcaacgtgtgtgcagtgaagtccttcttccttctcgtttcaccctgggtctcctcctcagggagtggcatcacggtctgctcagtggcaggcaagccccagatagcgcttccgtcttgactcctcactctcctccctctgatctgtcccagaatcccatcagttcttcctccaccccacccgacccacaattctctgctacacttgtctccacggccctggtctgaaacacatgatgcttcacctggactcgtaggcgaccgatctttctgcctcttggcttactactcttaagtctcgccttcacgggcagtcgcagggatctttctcaagatctaatttctaatgattgcatttttcttctttaagcagtaggctgaaagccaaagctctccatctttttacaactcaaaaaaaaaaaaacaagggtgccctctgtctggccttgccactgttcaacctggtacttgcaagtcttgtccagtgcaatgggatgagaaaagtgagtgatagaaggatcggaagcaaaatgaaagcactgttattgtcaagtgatgatcatcgacatagaaaacaagaatcaacagaaaaattaacctaatgagagagttgcacaaaggtagtttaaggtcagaatagggccaggtgtggaggctcacgcctgtaatcccaacactgtgggaggctgaggcaggaggattgcatgaggccaggagttcaagaccagcctgggcaacatagtgagaccctcttcttttttttttttcttttttttgagacggagtcttgctctgtcacgcaggctggagtgcagtggcacaatctcagctcactgcaagctctgcctcccgggttcacaccattctcctgcctcagcctcccgagttgctggggctacaggcacccgccaccatgcccagctaattttttgtatttttagtagaggcggggtttcaccatgttagccaggatggtgtcgatatcctgacctcgtgatccgcccacctcggcctcccatagtgctgggattacacgcgtgagccaccgcgcccggccaaccctcttctattaaagatcagaggctgggtgcggtggctcacacctgtaatcccagcactttgggaggccaaggagggcggaccacttgaggtcaggagttcgaaaccagcctggccaacgtggtgaaaccctatctctactaaaaatacaaaaaatattcgggcatggtggcgtgtgcctgtaatcctggctactggggaggctgaggcaagagaatcgcttgaacgtgggatgcagagttgcagtgagccgagatcacaccactgcactccagcctgggctacagagtgaaactctgtctcaataataataataataaaggtcagaatataaagtcagtaatgggttcctccccaaaaataatacacgtattgtgagtaataaaaataaggtattctgcatgatactgaaatatttatgcattaacctaataaaaaaatgcacagaatctttaaggagaaaaacctgaaattctaatatatagattttgtttaaaaaggcttgaatacataaatagtgagataatgtcttaaccttgaaggaatgtaaattttctgttacatgatctaactatgcattgcaatttcagtaaaaattccagcccaattattttggaacttgagaaacttgattcttaacttttaaggaagaataaaaatccatgatctgctaagacaatcttgaaagaggacaaagggaactcttattcaacaggcattaaaacggattacaaaggcatagtaattaaaataaggtgatattggtacagaaaaacaggtaagtggaatagtttggagagtacagcataaactcagttatatatggtaacatataatatttctgtgataggaagggatttctcatgacctccaaatcataagctgaaaggtgagacgtgatggattttgactacaccaaaatgaaaaaatgttgctttgctacagacaaaattaacatatgagtgataagctagaagatattatccatgttttaaatgaacaaaaggctataactagaatacacaaggagcttctgaaaatcagcacaaaagagaaagagataggaaaccgaatttaaaaaataatgggcagccgggtgcggtggctcatgcctgtaatcccagcactttgggaggccaaggcgggcagatcatttgaggtcaggagttcgagaccagcctggtcaacatgatgaaaccctgtctctactaaaaatacaaaaaaaaaaaaaaaaaaaaaaatgaaccgggggtgtggtggtgtgcacctgtaatcccagctgctctggaggctgaggcacaagaatcgcttgaacccaggaggcggaggttgcaataagctgagatggcgccaatgcactccagcctgggtgacatggtgagaccctgtctcaaaataataataataatagtaatgataatgggccagatatatatatgccgttcacagaaagaaaaatcagaatgactgaggtatccagagaggctcattctcactggcagtcagaagaaggcaaggggaaggaatgagatgtcacattgccccacgagctgatacaactcagcaagccagatgatgtgaagtgctggcgtggatggatgagagagggagtcccatgcacttgtgagtgagtgtgtggccagttacagtgaaattaaatacgtgtatacttttgcagagctaggaccagggagaggaagggaggtgcttgggcacacacgtaaggaagcacttactgtcagggtcgaccccaccccttataaagccctgaaagtgagggctttcttagtttttttgtttgtttttgagacagagtcttgctctgtcacccagcctggattgcagtggtgtgatctcggttcactgcaacctctgcctccagggttcaagtgattctcatgctttagcctccggagtagctgggattacaggcgtgcatcacaccgagctaatttttgtatttttagtagagaccgggtttcaccatgttggccaggctggtctagaactcctgacctcaggtgattctcctgcctcagcctcccaaagtgctgggatagcaggcttgagccaccgcaccgggtctgttcttaaattttataccttaggtgccgcattgccttgccctaggcccagccctgtacgttccgcacagtttcactcttggttatgtacctaaagagacttcatcagaggtccacagcgttgcttatgacgtaggtatcccccagagggacctggacaggtagaacttggtacatgaagacaatgacaagtatttttacagagggcagggattccctagcgcttggcctctgggaaggagtttggggaacttggtgaaagacagctgagagcaaaatacaaaatgactttgttccagcttctcagaagtgagaccagagatgacatttgcatctgccttggagcgttttgtagatttctgagcctttgtcactgatcctcctgccttgcccccaataaatgcctttgaatttaggtagaaagaaagttggaagacgcccgcagggtgtctaagaagggttaggcatattttcactatgcctataaggaagcagaggtcagataaggaggcagaaactggagaattccagatcctgctcctctgtcaaggcagaaaggatttagagggcacagcttggactttggagtttacatatattccattcccttttctactctctagagatgagaacttgggcaggaaacccagccacagtgaactttggtgttcttcccagtgagatgggaataataataaggcctaactcagaattggtgttaggagtcaaaggagaaaggatatctgaaaccacttatcttcctccctcctcttctgtcaaacagcatagacaaatggagattccctgactttaaaaacaaaacaaaacatttttcagtcatgggacagcagtctaggggcctttaggaagaaactgaggaccaaaggatgcaactgagtactgtcagctcaagtggcaaatgaagtcatcagctccaggtagttcaagtcccagccccacctggctttgaggtgaggttgtgctttgagccggtaccattttggatgttgctcagctctggaatgagaggtggggtaggaagggtgtgatggttaattttaggtgtcaacctcactgggtaggagaagcccagaaagctggggaaacactgtttctgtgtatgcctgtgagattgtttctggaagagactagcattagaatcaagagactgagtaaaggaagtgtgccctcaccaatgtgggcaagcatcatccaatctattgaggacccagatagaacaaaaatgcagaggaagggtgaattctctctccttgagctgagacatccatctttagttcccggacatcagacattggagttcctggttcacaggccttcacgctctttgttgaaagaatttttttttttttttgagatggagcctcactctgtcacccaagccggagtgcagtggcacgatctcagctcactgcaacctctgcctcctgggttcaagcgatcttctgcctcagcctccccagtagctgggattactggcacctgccactgcacccaactaatttttgtatttttagtagagacggggtttcaccatattcgccaggctagtcttgaactcttgacctcagatgatctgcccatcactgcctcccaaagcgctgggattacaggcatgagccaccacacccagcctgttgaaagaaattaaggaagacctaaataaatggagatatacatctataccatgttcatgaattggaagacttggtattgttaaaatgtcagttcttcccaaattgatctatagcttcagtgcaatggtgagagttacaccattggcttcctgggttctcaggactttggacatagactgaattaccccattgtctttcctggatctccaactcacagatagcaggtcatgggacttctcagcctccataactgcatgagccaattcccataataaatctcctctttttttttttcttttttttgagatggagtttctctctgttgtccaggctggagtgcagtggcgcagtctcggctcactgcaacctctgcctcccaggttcaagcaattctcctgcctcagcctcccgagtaactgggactataggcgtgcgccaccacggccagctaattttgtatttttagtagcgatggggtttcaccatgttggtcaggctggtcttgaactcctgacctcagatgttcctcctgcctcagcctcccaaagtgctggtattacaggtgggagccaccatgcccggccccatactactttgattagtatagctttataataaatcttgaaatcaagtagtgaaagttctccaaatttgtctatctttttaaaaaatagctttagccattttaaatcttttgcatgttctctctctcttttttttttttttttttttttgacagaacgaagctgtaatgcattctcatttaaattttaacatcagcttgtcatatgctaccaacaaagcctgctgggatatagattgggattgcactgaagctgtagatcaatttgggaagagctacattttaaaaatattgagtcttccaattcatgaacatggtatagatgtatatctccacttatttaggtcttccttaattaattaattaattaaccttgtttctttttatgagatggagtatcactctgttgcccaggctagagtgcagtggcacgatttgtgctcactgcaaccccctcctcctgggttcacacaattctcctgccttggcctcctgagtagctgggattataggtgtgtgccaccacacctggctaatttttgtatttgtagtagagacgaggttttgccatattgaccaggctggtctcgaactcctgacctcaggtgatccgcccgcctcagtctcccaaagtgctgagattacatgcgtgagccactacccctggcccttcatttctttaaatgatgttttgtatgttttggcataccaatcataaacatattttgttagattcatccctaagaatttcactattgatttatttacttgtttatttttagagttgctgtgtcacccagggtggagtgcagtggcgtgaccatggttccctgcagcctggaggccctgggattcagtgatcctcccacctcagcctccccagtagctgagactatgggcacactccctcatgcctggctgatatttcattcttcaagtgtcattttaaatggtattgattttaaaatttcagtttctagtcacttctatttattttatttttgatacattctttcagattttccacacagatttgaccctggggtttgggtatcagtcacattttcctgtgcccaagagatggggaggatgtttctcaagggaggacttgcacacttgatggggcctcttactctgcaagagcaggatgaacaggggctagtgtggtctggtaactgcgactcaggtggaagcatggctttctcagctgatgcctacaagtgtagatgtctcaactgtaaccagtggatttccacatcagagagcaacaagtcttgtttctcatagtttctagttctctgctgagaatagttgtctttttatacatattgatcagagtttcctttgtattcatctgtgtagttatgagagctgccctaaagttaccatctgctagtttcatcaccacaggtcactttttatgtcgtatccattggttttcttttctctggagtttgggtcttgttttcctgttttcacatgtctggtaattttggattttatcctggatgttgccatgacatgttgcagagactctggactctttatactttaaagagtattggttcttcccccaccccagctttattaaggtatagttgatatataaaaatcatagatatttacaacatgatgggtttttaaaaaaatttttatttttggtttgggggcacatgtgaaggtttgttacacagataaacagggtttattgtacaacaaatgggggtttattatacatattattacatcacccaggtattaagcccagtacccaatagttatctttttttgctcctctcccgcctcccattctccccctcagtgtctgttgtttccttcttctttgtgttcataagttctcatcatttagctcccaacatgatgtttcggtatctgtatacattgtaaaatgattccaccaagttaatcaacatatctaccacctcatatgcttatcgttttttttgtgtgtgtgtggtgagaacgtttaagatctactgtcatagcaatttttaaatatgaagagtattgatttttttgtttaagtaggcaattaacttggctaaacttaacatgtaaactctctctcccctatagaggatgacagttgaaatctgaagttcatttagccttaactgctgcttaatgacttcctcactcatacctgattctggagttggcaagagatttgtgcattttatacatggatttggggactccccttctgtggctctttttttttttttgagatggagtctagctctgttgcccaggctggagtgcagtggcatgatctcggctcactgcaacctctgcctcctgggttcaagtgattctcctgccttgacctcctgagtagctgggattacaggtgccctccaccaggtccagctaatgttcgtaattttagtagagacggagtttcaccatgttggccaggctggtcttgaactcctgacctcgtgatccacccgcctcggcctcccaaagtgctgggattacaagcgtaagccactgcgcatggcttttctctctctttttattttttttttttagaaatttcgccagtcgtttttgttttttgtttttagtttctgtaattacagtgacctttagtttttcaagccagtaagtttgtttgtttgttttttcttttttgagatggaatctcactctgtcacccaggctggagttcagtggctcgatttcagctcactgtaacctccacctcccgggttcaagagattctcctgcctaagcctccctggtagctgggattgcaagcacgcgccatcatgttcggctaatttttgtatttttagtagagatggggtttcaccatgttggccaggctggtctcgaactcctgagctcaagtgatccccccgcctcagcctcccaaagtgctgggattacaggtgtgagccaccgtgcccagcgcaataagacttttctacccaagaatttctatctgagtcctgcatggagtagtcctgaatggctcagatccatcagaagggaaacttgcccagtgctgttctcttctaagtattgattctcctgcagtatctgcctttttgttgctgtctggggacttcagttactgttcggatttgtggctgttagctccggaagggttgatcagatattaggtagttgaccatgacaagagcaggacctctgagcaacgacgctgtcaacagtgccatgactctgttagtccttgaaactcagaaggaggaagagggtggggaggaaagtctaaactggctgaatttaaatctgaaatgactgaacaaagctcaaagtttctgagaaaaccaccatctgactagattgactcttcggccatcgtgtaaaattttcagttatagaatggtagagaaaagtgcattttcccatctacatcttgtggcctgaaaatatcttccctcctgcatataggaaggaaaaaccttgaaaatggtggatgtgggatcggggagaggctggatgaaaagtagttatatcttccaggtactgagttttctcatgcatagaatggtggggttgagggaagtctagaagattccaaagtctgttctcgctcgcacacttacactaagtgctttttacgaacttctgaggccacaaacttctgccctgacaagagtctctccctgtgaaaaaggggtggaagtccagtgctggagatgccttccaaggctgtaggcgcccctccaccgcttctgaggccctgcctctctcaggtcccaggtctctgtcagaggagttttggggcagagccggagctgttgaagggtggggcagccagacattccccagagctctttcctgtccagattcgatcagacctgtggctttttcaggagaggacagtcaggcccttgggcagctgaacctgatcagcttcccttactctaccttatttcttcctttaatatttttatttctttttagaacttcagttcctgtccctgcttaggagaggggagttgtccattagacagaatctacatctaccctagattcttctatcactagttttttttttttcccaagtctagcttagcagtaagctctaaggtcccagcctagcaaggctgctgggagaaagacagcctctttcccaggaattccagcaaaagtctcagggctgagcctcattaatctgtcttcggtcatgtgaccatccctgagccagtcccggaggctggggagatgaagggccctgattggccagccctggtcatggccacccctaaagtcagggccagaggtaactccatcccaatcacctggacagaagggggcttccccaaggatgagggcgggactgttaccaagataagggagatgcatgctgggaggatgaaatcaacagacttccacaacataagtttttctcaaagttccggatccaggattcacgagtgttgcttgccctgtgccaggcacttcctttaccttttgtatctagttattttatcccaagagatcatgttgttccagacagggaactgagcttagaaagaggaagggcctttcccaagccgatggcacagggtctgcacttcctgcctgggaagcaggcctggggcttcccacgtggcctgacccctctcatctgacacctgccccccactccctcccctctgcctgcaaaactgacatgaggagactgcttgtgtttccagaaagaggggaattggcaatagccatgagttgagacgacttgataaaatatttcttgttttctcgagtttacatagaccaagttttcactgttgctatggggtgggttggcagagagatgaaaataaatctgtgtaatttattttttctctgagtggagtatatttctgctggcttcatacacatgcacacacgcgcgcgcacgtgcacacacacatgcccgcacatacaggctttcataaaatacttaaacccctctaatgctctctgtggaaggaataaatatgtactgtactttcaacttgtgttctctgaaataccatatggtctgcactgtgagcttaaaatactctagtgagcggatgctttcatgcagcagatagccaggtggagctctccctgccaatcttacaacgttaattaatcctttaaaatagagcgtggaggggtccctgcgtcagaaacgggtgctgtgtgagggaagtagcccggtggcctgcaccggggctgagcagagagtacaaaggcggtgggaaggtgggctaggccgggagcacccctgctgcctgacggcgcctttgatgagcccgctcagtcactcagatactcacagtttgcattctgcataatcagtctaacaggctgatggtttgcatgaatatctaagtttgtcattgtggttaatttttcctcaaaaagaggccccctatctctctggcccaatgcatatttataaagggcagggaagtcaggcagaggatgctggatgaaggggcggctcagggagggggccccgtggccggtccctgaagcctgggaggccaggctcctgccagagctggtggctcagagaagggtgcagagctcctcagagcctggagggaaggaactgcagggagaggggacagcctggtttgcaaggccccatttgggctagcctcttccctgctccaggcctcagtttccttatccatacaaggagcatgtgggccacttgatccaggcctcagggtcccaaaggaactatcctctccaaatgaggttacacagagtcagagaggggagggagagaggctcacatccattcaacaactttattatttatttatttatctacttttctttgagatggagttttgctcttgtcgcccaggctggagtgcaatggctcaatctcggctcactgcaacctctgcctcccaggttcaagtgattcctgcctcagcctcccgaatagcttgtattacaggcgcccgccaccacgcccagctaattttttgtatttttagtagagacggggtttcactatgttggccaggctggttccaaactcctgacctcaagtgatccacccgccttggcctcccaaagtgctgagattacaggcatgagccaccatgcccttgttaagctgttaagcttacttaacaactttagtggtgtgactccttcccagagcacctgtggtgctccacgaccaagtatttttataggttaaaaactccagttatcttgtaaaaaacgtaattgcattatgttgtatatattttggtgtaaaaagcattaaattgctcgttttaaataggctacggttatttttgttttcttttgtattttgtttttgtgtttgacacagggtcttgctctgtcacccaggttagagtgcagtggtgcaatcatagctcactgcagccttaacctcctgagcccaagcaatcctcccacctctgcctcctgagtggtcatgaccacaggtgtgcaccacaatgccaggctgattttttttttttttgagacagagtgttgctctgttgcccaggctagagtgcagtggcatgatctcggctcactgcaacctacgactccgtggttcaagcaattatcgtgcctcagtctcccgagtagctgggattacaggcatgcaccacacccagctaatttttgtatttttagtagagacagggtttcaccatgttggccaggctggtgtcaaactcctggcctcaagtgatctgcctgcctcggcctcccaaagtgctgggattacaggtgtgaaccactgttccggcctgagccactgtgcctggccctggctaatttttaaattatttgtagagatagggatctctctatgttgctcaggatggttttgatctccagtgctcaagtgattctcctgcctcgacctcccaaagtgccggaattacaggtgtgagttaccgcgcccagccagctatggtttttgtaaccttgttttggcattttttttctgactcgtcaaagaatatttcggcaactttggagtggccaggcttccctttcccatgcgcagcaggaagtccaggtgggaatggggagaggctgggagatccctcaggtcggcggctttcagagctctccaggccacgcctctcagtggccagcaggtggcagttctgagccttccacctggccaccctccttcctccacccccggggtgcccgtccccccagtccacataccacagagtcccaggtggctggagagagctcctggcttccaggccctgggccattctgagaagctggatgaggcagcctagtggccatccagctgcccctgcctgggactgcctgcctaccccttcccatccttggctccatgctaaaggaaggtgggcttcctggaggagctgacatcttaagtgagacctgcaggacaataaaggatttcaggcagagggaacggaatatgcccaaatccagagaatccagaccctgtgctttcaggaactggcaggaggctgatgtggctagaatgcagactgttgggcttgggagagggactagggaggccaggtaatgcttggcactctgggagcagcaggaccagggcagcccgagtctagacattatcttgagggcagtaaggagccctcagcccattctaacccatcagagttggcctccggaaggatcgccatggctgcaaactgcctagcctctcatcgcccctcacccgctgtcactcacacacctgggcctcctaccgtgctggccaggaaagagctgcaagtcctcgggcccgaggctcggcaggcagccgacctaccttgcagtcctcaggagaagctgtccaggaaccccaccctcctgagctcccggggctttggtggggaagggagcctcccagggtcccggagcactaaacaaaaaggagctgaaggtcaccacactttggccatttgcagggagcccttccccacacaggggcggcatgttcccttgtggctgccagggagcccccaacacccctgggaagatggcaggtcgaggggaggggacatggcctgaaaacaaggaagcagtctgcaatggggagatgtggggcatggggctgttttagacagaggaggcggcaggtgcgcgtatgtaggtttgaggtagattttgctacccaggaaatgggctcttgcctcttccacctgcctgtgaactggccctgggacccagcaggagaggctcccctgagtgacttgtgacattcttttttttttttttttttgagataagtctcattctgttgcccaggctggagtgcagtggtgcgatctcagctcactgcaatctccatgtcctgggttcaagcaattctcctgcttcagcctcccgagtagctaggattacagattacagatgtgtgccaccaagcctggctaatttttgtatttttagtagagatagggtttcaccatgttggccaggctggtctcgaactcctgaccccaggcgattcgcctgcatcggcctcccaaagtgctgggattacaggggtaagccaccttccccggccaacacatggtgttctgaaacagcacagcctagtgtaacctcaattggtaattaattaattacactccccaggtgtctcctggagtccttcctgtaggggaggggaggctgaggctgcagaggccccattcagagggctgttgaatgactcatggctgttgagaagtaatgtccactaaataacatctgattctgtatttaacatttaaatatttaattaactaaatgggccaaatatttaatcaagcaccatcaaagccactgtgagcctccactttgcataattccaaggcaggccagcttccctccgagtccccatcctcatcctgacagtgctatcagtgcccctgcctggtgggaaacatacccattctggtacccaattctttttttttcagagacaaaatctcactatattgcccaggctggtttcaatttgcccaggctggtttcaaactcctgcactcaggcaatccgcctgcctcggtctcccaaagcactgggattacaggtgtgagtcactgtacccatccatccgataccacattccgagactcagggcatctcatgtcctaggcaaagttgcttgtttgcttttgttttgttttgtttgtttttgagtcagggtctctctctgctgcctaggctggattgcagtggtgcgatctcggtccattgcaacctctgcgtcctgggctcaagcgattctcctgcctcagcctcctgagtagctgggattacaggcgcgcaccaccatgcctggctaatttttgtatttttagtagagatggggtttcaccatgttgcccaggctggtctccaacttctggcctcaagtgatccgcctgcctcggcctcccaaagtgctgggattacaggtgtgaccaaccgcaccccaccacagttgtttgattagactccaggtttgctatgctggagatagagttccccccatggccaccctttcctctcctctttctctttcctccccaagtagacacaattgagactggctgctgggttcccctggaggcagtgtggtaccagtcttcctgcctctgatgacagattcaggccttgacaacaggggtgaacatgtgacccagtctggaccaatcagaattcttctccaggatttttgtaactggagttaaaggcgggaagacttttttgagctggacttgctctgtcacccaggctggaatgcagtggcacaatcatggctcaccgcagcgtcaacctcctgggctccagtgatcctcttgcctcagcctcctgagtagctgggactataggcaagcaccactgtgcccggctaattttttttatacagacgggatcttactatattcccagagatggtcccatggtgtcctaatctctgcatccagctgttcctgaagatgggcctaccctgatctttctatgggagggcaggtgaaccaataagtgccctatgtctttaagccagtggaaatcagttttctatcacttgtatccaaaagtgccctgaccaatacctactccaccattatagtcatgtagcttatgtgcaaataaaatgacttttaattatttaactgtaaataatacttgtgttagattagtgcaaaatctttgtgcatttacttttcagccaaaaccacaattacttttgcaccaatctaatatctaatagctcatagctcatattcctaccagtaagtttttttgtttttgtttttgttttttttttttttttggagacagagtcttgctctgtcgtctaggctggagtgcagtggcgccatctcagctcactgcaacctcctcctcccgggttcaagcaattctcctgcctcagtctcctgagtagctgggactacaggtgcgcgccaccacacccagctaatttttgtatttttagtagagataggatttcaccatattggccaggctgctctcaaactcctgacctcgtgatctgcccgcctcggcctccaaaagtactgagattactggcgtgagccaccacgcctggcagcaaggtatgtttaggtttccttgaatatgtcctcggctcttcagaatgaagggaggatctgagcctggaaggatgggtccctctgacacctgctatcctgctgatgaggtcagcgtgcttctggaactgctgaatcctggggctctggtgacgtcaccatctctctctccctcttcctctccccccaccatgcctcaccacaccccacctcttcctgggctttgcttttcattatattggcttcgttatcctgcaagtgttcttccagttgtagccccagcagctccaggcttacactgtccttgcgagaaatccctgtggaagagggcagttttttttcccaatagaaccacaaaggtggctaggcgcggtggctcacgcctgtaatcccagcactttgggaggctgaggcgtgtggatcatctgagatcaggagttcgagaccagcctggccaacatggtgaaaccccatctctactagaaatacaaaattagctgggcgtggtggtaggtgcctgtaatcccagctacttgggagtctgaggcaggagaatcgcttgaacccgggaggcggaggttgcagtgagctgagatcgcgccattgcactccagcctgggcaacaagagtgaaactccatctcaaaacaaaaaacaaaaaacaaaaacaaaaaaacccacaaaggtcccaggaaaggctctgattggatagacttgggttatgtgcccattcctgaacaaatcaccgtggccacagggagaatacatgcattggctcagctgagcaacgtgccaggcagagggggaaatggaggaaggagcactgagagaggggtggttccctaggaaaagttcctgtggtgctgttgaccacaggaagagtgaggggagctggccagtccagtgacaccctgcctaggaagcttctctaccctggagacttcaccctgcagagggtgccctctgggtgctagaaatggaggtgggactgctgcaggaggggaggaagcatgaggaatgtgtgtgttccacagtctagagaagcaccagggctatcactgcttatccttccccttgtggcagagagtgggtgggagggtatttctatgcaggcagttatatagtgtggactgaaggggacagggagaaagcaccaagaaagcccttactgtatacaggacagtcactctgagagacttggggcacaattacttactgagctgcccagggaattccctgcattttggccattaccatccaagacttcgtgaatccattttcttgctggtgggagcataaattgttacaaccagccttcacggggggcaacgtggcaacattgattacatttaaaaatgcacagactcccagcactttgagaggccgagatgggcagatcactgaggtcaggagtttgagaccagcctggtcaacatgaggaaatcctgtctctactaaagatacaaaaattagccaggtgtggtggcatgcacctgtaatcccagctattcaggaggctgaagcaggagaatcactttaacttgggaggtggaggttgcagcgagccgagattgcaccactgcactccagcctgggcaacagagtgagattctggctcaaaaaaaatagtaataataggccaggtacagtggctcatgcctgtaatcccagcactttgggaggctgaggcaggcggatcacgaggtcaagatatcgagaccatcctggccaacatggtgaaacaccgtctctactaaaaatacaaaaattagccaggcgtgatggcacacgcctgtaatcccagctactcgggaggctgaagcagcagaatcgcttgaatccgggaggcagaggttgcagtgagctgagatcgcaccactgcactctagcctggcaacagagagactccgtctcaaaaaaaaaatatatatatatatagtaataataaaaataaaaaataaattaaaaaaagaagctccctggcaattctaatgtggcccagaccctctggtccagatttccagcccctgcagaattcctggtctcctcttggctccaccccagcacacaccaaacctggggttcggggtgcggccctttctccttgatttcccctcgaaagtgtccttcccctcctgctgggtgctgggtgaggccagctcacggtggagtgctggggaaggagtagctcaccctcacaaccgcccatgcaggagcccctctctgtcctccccctggaaaagggaacttggcattctgtgtagcactgctggcctcaggaaacctggtgggctgcatgcccgcatggcctgagaggacactgccagcactcagcagaagggtcacgttggccagctcactccctgccagcccctgaagtcgaagctgcctgaaactgcggtgctggtttgccactgccaggagatgccagcagcctaatttacatggctgtccagggtacccccagccatgcgacagccaggaaaactgcaccccatcttagaaaactcaggaacctgagggaggaagtccaaactgaaaaacctcaattagccaggcgtggtggcttgtgtctgtaatcctagctactcagaggctgaggcaggaaaattgcttgaactcgggagatggaggttgcagtgagccgaatcatgacactgcactccagcctgggcgacagagcgagactccatctcaaaaaaaaaaaaagaagaagaagaaaaagaagaagaggaagaagaggaagaggaaaagaagaaggaggagaaggagaaggagaagaagaaggagaagatgatgaggaggaggaagaaaacaaaaaacaatacaaaacaaaacaaaacctgttccaaacagcaggcactgctgaggaaggaaaagaactttcacaaaaaagtaagacagagatgaactggtagttgcatggtcggggaggactatcaggaaccaaaagaatcaaacgacttctctgtttaaaaattcaactgataaacccaggaagggaatgatcactgctgagaaataagttgataccatgagagttcaggtggaaggaaatctcaccgcaatgcaaaaccagaaaaagatttggaggacaaaccctgatgatctaacattcaaaaaagcaaaagagaaggaaaaaaaagatataaagggaaaacgataatcaaataattaatcaaagagcattttcttcctttctttttttttttcagagatggggtcttgctatgttgttcaggcttgagttccatgactattaacatgtgtgattgtagcatactacagcgttgaaactcctgggctcaagcaatcctcctgcctcagcttcccgagtagctgggtccgtaagcacacaccactgtacccagctcctaattaaagaacattttctaagctggcgaaagccttgattaaaagggccgatagagttccaggaaggattaattgaaaagacatatacttaaaacagaccctggtgtaattcctgaattatgaacttccagacagaaagtaaggttacttacaaaggaaagaaaaatcacgttgatgttggctttgtcatctgccaccctggaagtcaggagacgaatggaacagtgacttcagggacaaggacagtgacccaggaatcctatgtccacaagagatatcatgcatacatcagggcaatggcaagagatttttctttttatttttatttgttttgagacagggtctcactctgtcactcaggctggagtgcctggtgtgatcacggctcactgcagcctagactggctgggcttgagcaatcctcccaccttagcctcccaagtagctgggaacacaggtatgtgccactgtgccccactcattattttaattttttttttttttttgtaaagacgggtctcactgtgttgccaaagctggaagagattttaaagtatgcaaagacttatatcctctctggggaaaatgctaaataaatactacagccaaaaacagatacactgggccaggcacggtggctcacatctgtaatcccagcactttgggaagctgaggcaggcggatcacttgaggtcaggagtttgagaccagcctggctgacatggtgaaatcccatctctactaaaaatacaaaaattggcctagtggcaggtgcctttaatcccagctacttgggaggctgagacaggagaatcgcttgaaccctggaggtggagattgcaatgagccgagatctcgccattacactccagcctgggcaatatatccagactccatctcaaaaaaaaaaaaaaaataagtccacaaaccctttgatgatcgtcccttcaagatgtggatcatggaccttaatttccctccctggtagtgtgggacagacctagtgacccacttctaaccaagagaatctaagagagtgacaggatgtgactgaggttaaagcataaacggtacgaggagttcctctgtctctcatcacttgatgtgagggaagctgtgttgtgaacagccccatagatgcccttgggacaaggaacagaagtctcctgccaacagccacatgaatgagcttcaaagaggatcctgcagcctcagcccagcctcagagggctgcagccttggccgacacccggttacagcctcctgagaaaccttgagctgggaccatttagcagagctgctcctggacctgacccgtagaaactgtcagataacaaacatctcttgttgtaaactgctaagttttggggtaatttgttaccctgccatagataaataatacaatctgtaaagaaacacaaatttctatgttaacagtggagaggtacccattaaaggaaatgaaaagtattgtggaatttctgaattaatacgggtaaagaatgatgaaaaacctgagccaaccatcaaagaaaagtaaatgggaaagggaaaataacaataatttagtaagcataaaccagaaaaatgtaataaaatcagtaaacacacaataagatggaagaggttaaacccattatatatcatctatcattataaattatgaattttcctatcaaattggaaaaaaagaaaattcaagtagatgctgtttatatgaggcacatttaaaataaagacacaatgaaaagttgaaaattaattgttgagcaaggagttaatggaaaaatgcagacaaaaaaagaagcatagtggcagtatgaagatgaatcaacatggaatccaaggggcgaggtcctgagcagagaaggagattatgaaacatggaagtgcaattcacagagaaactaaagtcttcagaaacatgtatgtaccaaataatgtggtagccaaacacataaagcaaaactcccaggaatacacagagaacatggtaaaaatataattataatagaaggtattttaatacaaaggactaattatctgagtatctattattcaagtccctgtaattataagactgctttgaaaaacaaaagtattcctggtacaattacagcagcaacaataatgataataagaaataacaaacgttaagctcctatgatgcgccagccaaggttctaagtactttacatgtactaacccttttggtccttaccacaaattatatgtcatgatttattactatctgttagccaagatgactataataatttcttccatccttgtatatacaaacttttgcaatgtgactttatcaattcctcttttaagaggcagaatgtatttttttttttttttgagatggtgtctcactctattgcccaggctggagtgcagtgatgtgatctcagctcactgcaacctctgcctcccaggttggagtgattctcctgccttagcctcccaagtagctgtgactacaggtgcacaccacaccaccatgcccggctaattttttttgtatttttagtagagatgggtttttgccgagttggccaggctggtctccaactcctgatctcaggtgatccatccacctcagcctccctaagtgctgtggcgtgagccactgtacccggcctatttttatttctttttttgagatggggtctcattctgtcacccaggttgaagtgcagtggctcagtctcggctcactgcaacttcctcctcccaggctcaagtggtcctcccacctcagcctctcagtagtggggactacaggtgcgaaccaccaagcctacctaatttttcatatttttgtaagagacagggtttcgccatgttacccaagctggtctcaaactcctgaactcaggcaatccagccccctcagcctcccaaagagaatctatttttatatccatgaatctggtctggctttgcaacttgctttgacaatgggatgttgtggaaattactttttttttacttgtgagttagccctcaagacactgcacagcttccactcttggtctcttggaacacttccaccatcgtgtgaagaagcctgggctgggctgctgaagacctgtagccaaacacccatcatcagacatgtgggtgaggcatcttagaacatctggtcccagctgagttgctggataactatagctgcattagtaaccaaggacaagatcagcagaagagccatccagctgagcccacaccaaactgccacacacagaattgtgagaaaacaaaatggtttttgtttaaaatttttgaactggtttcttttgcagaactagacaactgagaaaccattcccattttgcaaatgaggaaatagaagcacaggaaggttgagtaatttgcccaaattttcacagctatgattatgattcttagttaagtcgtgacttgaatccagttactaatgaattgagcttttataaaattattattcactcaaccattcctcccagttcactgttagcatttatcctggacaaatgcatcagcatttttgatggtcagcctctcaataatcgtagaaataccccatagtacaatataattcaagtcaattacaaagtgaaactacacattttgaaaaaaaaaaaaaaaaggattttatgaaagagcaatattgggtgaggtgctggtggctcatacctgtaatcccaacactttgaaaggccaaggtgggaggattgcttgaggccacgagttcaagaccagcgtgggcaacatagtgagagcttgtctcagtacataaataaaaataaatggtttgattattgtgacagaagttgtcaactgttacccaatattcattctgttttcactgacatgaacccagttttgcctagggtggtaatgtactcagctaaaaatcctctcctcccagactcttctgcagctaggggtagtcgtgtgatggtgtttcggccaacgtaacatgaaaaattctacttgtggggcttctgtgaaagttattgctttcccgataaataaggggcagactaaggtggctcaaacctttttgccttgagtcatgccccctttgaactggaatgtggatgagattcctagaggtgcagctgctaccttgagaaagcaaataggaaaccttcaggagggtgaagcgggggccagaagggccacatctgtgatgtttttcgtgtgcaatggcaccagcccatctgtttgcctttggattttttttgtcatataagaaaaataagctcctagcttgttaaagttgctaaattgggtttctgtcaaatgcaaccctgactgatacaaatagcaaaggattaagagaggcccttaggacgatagctgaagccatcaattaccttttgcaaaacacagtagtattgcagaagtcagatgtgaagtgaagggtgtcttgtcatgatatcacacaattttattagaaaaattatactttcaaaaagtcaacattagatttattatttctaagcaaactttttattcaagtataacatacctatgggaaagtacactggatttatatttgtcttaaaaatgacattgttgcaattataacctaaatttcagtaaatattagataaagtaaatgtcttttttgtactacttggtttcatgtctcggtataacattatgcatgaaattttgccctcccccaagtggattcacgctaaagtgttttttctttttcctctaatacaattatttttggataatgatgatgacttgtatctctttcagaaagtagtagatttctgtagaaaggcctctgtaggaggccgggcgcagtggctcacacctgtaatgccagcactttggtggccaaggcgggaggatctcagggaatcaagaccaaaaaaaaaaaaaaaaaattctacctgttatcttctctgatcatatcctagtgaaaacagaaagcaacaattaaaaaaaaaatccctaacgcggtgaaaccccgtctctactaaaaacacacaaaaaattagccggacatggtggcgggtgcctatagccccagctactcgggaggctgaggcaggaaactggcatgaacccgggaggtggagcttgcagtgagccgagatcgcactattattgcactccagcctgggcgacagagggagactccgtctcgggggaaaaaaaaaaaaatccaacccccacccccaccccccggccctcccactgcccctgcctgctcccctcaagaatcattgaggaaaacaaacccgtaatacttacttggaaattcaaccatttctttttttctttttttttttttttttttttgagacagagtctcgctctgtcacccaggctggagtgcagtggcgcaatctcggctcactgcaacctccacctcctgggttcaagcgattcccctgcctcagtctcccgagtagctgggactacaggcgtccgccaccacgcccagctaattttttgtatttttagtagagacggggtttcactgtgctagccaggatggtctcgttctgacctcgtgatctgcccgtctcggcctcccaaagtgttgggattacaggcatgagccactgcgcccagcctcaactatttcttgacatgtggatcaaaaaaggaattaaggagaagaatttttttttttctgagacagagtcttactctgtggctcagtctggagtgcagtggcaccatctcggctcactgcaacctctgcctcctgggatcaagcaattctcttgtctcagcctccccagtagctgggattacaggcatctgccaccacgcccggctaatttttgtatttttagtagagatggggtttcaccatgttggccaggctggtcttgagctcctgacctcacgtgatccacccacctaggcctcccaaaatgctggaattacagatgtgagccaccatgcttggcctcacagacatttttaattgtaattaaaattatagttactttgcaaaacatgtaacaatttgtcatcccaccagcaatgaccaggataggtgtccacttccccacaacctcatccaccttaaatgctagtgttcttttgaatttttgtcatagtcacaggtactgttctggcaggaatgttcctgacactttgagaggctgaggatctttgcacatgcttgtaggatgtctggagctcctcttctgtgaattgcctcctcctatcttggcccatttttccacggtgttgtttgcctttttgttatcagcttgtagaaggcctttgtttattaaggtcaaggaggcccaggaagtggagccagccttgtgagcagggagggttctttctggggcaaggggcagatcagaagatctgatagagagcccccccccctccaactacgtgctcacagtgtgttcaggacttacagaccacagagcaggaatgtgcagggctcaggtcagcattagggtcaggttcttaggaaaagaaagagcaaaaacaatgaaacacaatacaaagtaaagaacaaacacagtgagaaaatataacataaaataaaataaaggcagtaaggccctgggcctgagaccctgagaaaaagctggtaggtcttagtccacaccctgccccgtgtttccttccttttaaatgtctgcagcaagcattcatattcccgtttaatgaaggatccggccaaacacggtagctcatgcctgtaatcccagcactttgagaggccgaggcaggcgcattgcttgtggccaggagttcgagaccagcctggccaacatggcgaaatcccgtctgtactgcaaatataaaaattaagcttgaacctgggaggcggaggttgcagtgagccgagatggcgccactgcactccagcctgggcaacagagtgagactctgtcttaaaaaaaaaaaaaaaattagccacgcgtgatataaaaattagctgggcatggtggcgcgcgcctgtaatcccagctactactcaggaggctgaggcatgagaatcgcttgaacccgggaggtggaggttgcagggagccgagattacaccactgcactccctcctgggcgacatagtgagaccctgtctcaaaacaaaaacaaaaacaaaacaaacaaacaaaaatccccgtgacccagcccagagaggaatgacagccaggaatggaactcgaggtttcattccacaccacaacactgtcttttaattttttattgttttacttctcttcattgcattttgttttatttcattgtttttaccctttctaaggacttgtgaataaatgcgtggaactgcaatgtgcatacagtaggcgcccaagcgggggcagtgcagcccctgctccccgcccgcgggtgccttcgctgatgagcctgaggcgggcagcccagccctcccgcccgtaggcagcctgactccaggccaaggggcagcggagagcttcggggctgcgcgcaggagcgcacggccaggtgggctttttatggcgcgggccgaggaggtcattctttttagtgggctgtacagcgtccaccgcgaggcactttatttttagcttcttgaaggctacgatggagccgcctcctccgctttcccagtgcttgcctccacctcccccttgacgcccgggtgcccgcggctgctcctggctgcagtgtcccgatctgtgtagtgcagggtccctctagaggtccccgggcaccctcaactctcagcccccgtcccctggcgcagaatattccagctcccgggtcatggccctccacccccactcgaacctccatcctgttctgcgcccgtcctgaattgctctttaaaatagtaataataatttccactttgattttggattcgttgggggggggggggttacacgtgcagatttgttacacgggtgtactgtgaggtttggggtacgaatgatcccgttacctagatagtgagcatggaacccagtaggtggtttttcagcccttgcttcgcccacaccccgtggtagtccccagtgtccgctggtccatctttgtgcccccgtgcaatgcgttgcccttgacgggccaggtgatctccccgaggtgggagcctggccaccctcccccattctgcagccttcacctccaacacccagccagggccagctcagaggcgccctgacttgcccacggggcctgcacccatgctcgcccaaacccctcgcatccagcactgcaggccgggttctgagcgtcgtcgggcgtggtggagctcggcggggcccagcgcgggccttgccgcggggacacagggcagggtcgcgctctgccctctgccgccactccaggtcagcatcctcagggctcgcgtgggtgacggcccgtctcgtagcgggggtgagctgggctggtccgaggggtctccgcggcctccccagccacagtccccgcccgctccgcgccctccccgcggggtcgatggctgggggacccggctccggcccaagccaatcagtccttcctgagcagcgtgaggtggctgcccgagggcgggcggggtgctgctctggcgggctcctggaggcctgggtggcgcagcccgggggagcggagggaggaggcggccctgagaccgagccgcgcggcgggtgggctcccctgaccccgctccgacccggccccgcgccctcccggccgctcgatcgcaaagcgtctgctgccatctggtggcggcgcccgggcatctgcggagcggggaagcctggccaggctggtgctcagacccccacccagcgcccccgcgcccccgcgcccgcgccgctctcccgggaagtccccaacagcctctggctttgctcggcttctcccagcagaaaccgagccccacgtctcctgggagccagcgcgcggtggccggtgccgtgcccagggggtgacgtgcgtccctctctaactcggttttctcatctctaaaatggggttcatggaagtgcgtgccttgtggaggcttcgcaaggctcccaggttcccttagctcagaaatcaggccttacccctgaggcgcgaggctgcgggcacgaggctgcgatttggcggcagccgtatttgcacactgtcacagaattaacctcagagctggctggctgcgggtcctggagggggtgcagaaaaggggagggcgggccaggctcccaccaggagcacctgcagatcgccctgatcgtcaagagcaaggcatgacccctgcagaacgggctgtaggctcggggcgaggggggagggggaggggactgtcaccggggggggggccagaatcctctgagcctggggacaggggactgagcgaggcaggtagagccccaggcccaggcaagagctcgaagagtattagcttttgctgttgtaaaccccatggggtggtctgcaaactgcttcccatactcgctccgtcatgccctggctcggctctgacatcactggtgttggccatatcgcggattttctgtttccccctctgtaaactggggatgccaatgccagcccccactcccggatgaggtacctggtgtacagatggctcggccactctgctgaccgtgcccccgacatcattgttccccggggttttccctctaagctccaagaggttagttaattctctgccagtgtgcagagactcccacagctgcccccaaaccttgaggtctccccccatatcctcctgccttataggcaaggcctgtttcctgagccaagggaaggcgggtgtctttcctgggaaccccctccgcacgatcacagactagagagtccaaaccacagatcatgttttctttccaaaaataggagccccactgaggcagaaacttcattcttttaataagatgatggtatgtttaaggaaaataaatatttcttttaaaaaagaaaaggcgatttggatccactcacatgccaagcactgtcccggagacccaggcttggtgcatggctgcggaggattccagcaggcatgcaactttaattacttctcagtgtaccacagaggtggcctgcagcaccgggtgtgacagcaaggtatgccaccagtaagggggatgtctcagcagctgccagcactctgcctgtgaaaacgccagctccaattcaaaggtatcaaatatttgcctagctgttcaacatttcttcaaataatatactcacgactaattcatatctggactcgacgtcttcatctctccaggcctccctcctggattagcgtgtcttgtctattccgggagaaagttgtcctacattctaaaaatagagctgggagtctggacatgggcatgcacagtcaggggaggctttatttatttatcttaagggttgtcctctgaagacagctgcagctgagcctgggactcactcatcaaatagccattcgcggctgggcgcagtggctcatgcctaaaatcccaacactttgggagaccgaggtgggtggattacctgaggtcaggagttccagaccagcctgggcaacatggtgaaaccccatctctactaaaaatacaataattagccgggcgtggtggtgggcgcctgtaatcccagatactcaggagactgaggcaggggaattgcttgaacccagggggcagaggttgcagtgagccgagattgcaccactaaactccagcctgggtgaaacagtgagactatctcaaaaacaacaacaacaaaacaaaaacaaacaaataaaaaaacaacaacagaaaacaaacagccattcataggtactcagcagagggcagggccttctaagaagtctgtgctggctgctgccttccaaaagaggccgtgctccactccaggggatgctccgtgacctctgaagtgaggacaccctctcaaatcagaggcacgggcctctctcctccatagaggggttcttccgttcctggggattaaaagccccaaatgcccctgtatcatccaggacccattgggtggattgctcaatctggccatccaggcggagttttataaataactgtttgcatgggggacctcaggaggaggagtggtaccctgggtctagtagcagtgggctgttcccatccctggggccgcagggctacgtgaggaggcgttctctgacgcagggcaaggtggctgtgtaggcagcactccctgatagcagtggtgaccgaagaaggaggaggagctcagggaacccccactctaggtgctctcctctgccccccagtttcctgctagggcctcccaggtccacctgcccagaaggcagagcgaggcatccacagatagagtctgtggaggggtacacagagccagtggaggagggtgaagggggtgtgcagggcagaggggagactaccagctcctctctcttttttgaacccgctccacctctccagcctccttctgtgtctcctgtgctaagtaccatttctctttctttctcatgtttcatcacctccgtctctcattgactctcctctctgttttcctcttgatatatcctccccacttctctgctgcagaagaggcgaggtgagtaccattcacctctcccaagtggtccagtggcagtggggcccccacgcactctacaccgttgttgtgttgctagaggaaggagagcagctgagccctggggacctggggacgggcttcatttgattctctgctcttcctcctctgaactactctaagtgaagccaatcaggattactttcatttcatcacttcaaggacttcctcctcggagtcttttcatccttctcctgccttggcctagaattagggagggggagttagtcccctcctctcttcagcccctctggccagcatcaagcccttattgagagctccaactgtgcacccagcgtcagaaatgatttggggtgcctgtgtccggagcatacagtcctgacatgggtggggacccatgatccattcattcagtcatcggacagaatgcatccagggccaccctgcttgggctccgggctagactttttttttttttttttttttgagatggagtcttgctctgtcacccaggctggagtacagtggtgtgatttcactgcaacctctacctcccagattcaagcaaccgatcctactacctcaggctctggagtagtagggactacaggcatgggccacgagcaccatccctggctaatttttttttttttttttttttagtagagatgtggtttcaccacattggccagggtagtctcaaactcctgacctcaagtgatgcagccaccttggtctcccaaagtgctgggattacaggtgtgagccactgggcccagctttttttttttttttttgagacagccttgctctgtcacccaggttggagtacagtggcactatcatggctcactgcagcctctaacttctggactcaaaagatcctcctacctcagcctcctaaatagctaggattataggcatgcaccaccacacccactaattgttttttttttccttttaatttttgttgttgttttgttttttgtttttaggcagagtcttgctctgccacccaggctgaagtgcagtggcatgatctcaggtcactgcaacctctgcctcccgggttcaagtgattcttgtgcctcagcctctcaagtagctgggattagatttcgcaccaccatgcctggctcatttttgtacttttagtggagatggggttttcccatgctggccatgctagtctcaaacttctggcttcaaacgatccgttggcctcagcctcccaaagtgctgggattacaggtgtgagccaccgtgcccagccaatctctggccctgatagagcagatagggaaggtgtgtagcacagtggatcagtagataagcccatccaagcctcagtctcctcttctcttaaatggggatgagaatccctactcacaggtttgtgtgaaggtaatatgacctcacagagggttgctttcttattaagtggcagggacttctgctctgcccctgaagcccccaaatacacataaaaggtgtaacctcagatgcaagtaaggaggcaccaccaagagggtagaggatacagacctgaaacacaaggaggagattggcacctcagctggaacagatgggcttgagcccccgaattctgctcgggttttaaattgaataaaataatccccagaatgaatatcccctctgtgaagcacgtccactgtgaggaaacccctagtaacagatctcaccatggcacaaagaaaatcctgctctcatagtcttggatgatatatacagccagctaatgcaaaaaaaatttcatgttatttttgcttatttttaagtccactgggtgcatcgtggctgatcgctgttctgacatttttcttccctcattaagaaagatgcccctggtgagatacctgtgctgggctcagagcagaaaataaatatcgctggcatccactttcctatactctctgggtgtaattaagaaaaaggcacctgcaggagagagaaagtgcagggtagaaaatggcccagtggttactgctcatgagaactccccagtcttcataaccatccaaatgtcactccttccatgacattcttcttcttcttcttctttttttttttcctgagagagggtctcgctgtgtcgcccaggctgcagtgcagtggtgtgatcatagtgagctatgatcagcctcgagtgagcccgagggagcagcctcgacctcctgggctctaatgatcctcccgcctcagcctcccgagtagcagggaccacaggcgtatgccaccacgccagtctacatatatatatttattttttgtagagataccgtctcactgttgcccaggctggtctggaactcctgggctcaagcaatccttccgcctcagcttcccagagtcctggaattacaggctggagctgctatgccggacccattacaacctcctggatctgccggggtccccctccatctctgagccctaacacttccctttggggacttttcctttccattgcggttttgcttttcccccttcacacgtctcttatcccagctgtagttggctgtcttgtttgttttgtccaagtcaccctgcttttctttggaggacccatccatgactcacagtccatgtgatttaggtagagctccagcagggagtggcactacccaggaatggccaaccaatgagggcacagaagtgcagctgcaggccactgtgattggttcaggggtgggcagtgagctaagctgaaccaatcagaacgaatcccaagatatggcggggaagtgctgaacaagcccctctccttgagctgaggctgggactgaagttgtagtcgcctttggcgccactggggagagcctgcctgtgaaagaattccactccgaggacagctgagcctctcatgacaatctgggtcctgatgccgctgtttgagcccctgggtgcagggctgctggaaacttccggaaggagattgctcttctctctgggagacgtccccggggaagcttcagaccctgccatctcgtccatccccaccatgcccaccaccgctctggctgaggcagctccctgcggagtcctgctccgggctcagtctcccagagaggcagagtcgggcaccgtgggcatgggagacctgcagcctgcctggttctcagctctcaggggctggccagggtcacagttactgtagcccagggggattctgtgagagacagatgggctaatttggctcgttcgtcatttttaatgccctaatttcctgttttacacgcagaaatggcccataaatggcacagcaggcttcagggagctgaacttgtacttcccgctgggactgacttactcctactttttggaatcaggtgcacctgcagccgttcaggagctggctggccgactgtcccagtacctccttggtcaccttcatacggagctttggtccttcaactttggaaagggttttgattaccgaatgccaggctctctttcagtcggattttcctttgccccactttatttcattttgcttttttttttttaaattattttctgggctaggagccggggctcatgcctgtaatgctagcactttgggacaccaaagcgggtggatcatgaggttcggagttcaagactagcccggccagcacggtgaaacctcatctctactaaaaatacaaaaatattagctgggtttggtggtacacccctgtagtcccagctactcaggaggctgaggcatgagaatcacttgaacctggggggtggaggttacagcgagccgagatcacgacactgcactgggtgacagatgagactctgtctcaaaaaaaaaattattttccgtagagatgggggtctttctatgttgtccaggctggtcttgaaatgctgggctcaagcaatcctcccaccttggcttcccaaagcactgagatgacaggcatgagctactgtgcccagcccatttgccccactttgcacactttctcctctcttgtcacctttccttccattaccttcaaatgtgctcatcaaaccgtgagcccctatgaggcactgggcgtgcacaccctgagcagaggcctccctgatgctccacgcccatgtagctttagtttctgctgttcctctctcctagggtgtcttgttccttccctgcataacccttatcatggtctgccattgctgagcattttgttatggttgtttattgggttcactgctgttacactgtcagttctcagaagacagaaactgatttctttttctccttaagaacgtttgcatccagctcagagactggcccacggagggccctagagaaacacccagggcgtgaccgagtgggtgggtgtgagtgtgccgcaccctggccctggtgctggaggggaaccaagcagaacctgccccaacactgctcccaggaggctcagcttctagaggggtagcggtgggagaggggttggtggggtgtggtgagctgtcctaagtgcaagtgcagatcagagtctgagctgcagctgggagagggagacaggaagcctgcccagcagcggggagcctggggtggactctttttttttttttttttttttgtcagagacagggtctcacactgtcaccgagggtggagtgctgtggtgtaatctcagctcactgcagcctcgacctcccgaactcaagagatccttccatctcagcctcccaagtacctgggaatacaagtgcatgccaccacactcggctaattttttgttgttgttattttttgtagagacagggtctcactatattgcacaggctcgtcttgaactcctgggctcatcaaggaatcctcctgccttgactgcccataacgctgagattacaggcatgagccaccttgccccgccttgggtggactcttgactgaaacacagaactttaagagaaatgcagaaataagagaatgggggctgccatccaatgcttgatcatattcgtctcctgctttgctttctgatcctgacttcccatggaggaattcagccttaggagcagaaatgggctgtggtttctaatctgccccacatcattcagcacagggctgggctgcgtggcctgtgactaatcagcgctcacccataagaaatggtgtgcatctgcaaatgtcgtggtgtcccttgcaatgccctatttcaggtctgcagtgggtgagggatgggcagggaagcacagtgaattatgtgacaccagcctggaatggcttcatccaacaaagggctgacattttctcttggtttattttgagatggagtctcaaaaatctgattacagatcacgcctgtaatctcaacactttgggaagtcaaggcaggaggattccttgatgagcccaggagttcgagaccagcctctgcaacatagtgagaccctgtctccacagttgcccaggctggagggcagtggcgcgatctcggctcactgaaacctccgcctcttgggttcaagcgattctcctgcctcagcctcccgagtagctgggattacaggcatgcaccaccatgcctggctaatttttgtatttttagtagagacagggtttcaccatatctggtctcgaacttctgacctcaagtgatccccccagctgggcctctcaaaatgctgggattacagacatgagccaccggcccggccaggagtgacatgttcattccaagagcccatctctgttcctgtattatttacaacggacgctggcctttcggacccccaaacatgtaagtggttctagctcgaggagaggtgtgaggcatgtgctatgggttcaagtcccagctctaccactgagtagtgaaaggcctggggaagctccttaacctctcacaggcttacttcctgcccctgagaagtgggagcagtgggtagccccaggcgagggtgggggttggggcaatgcctggcccataatgaagcaccctctgccgagcctctgcgtggctgccccgaagcctgggtgcaaggcccctctgtcacctctggagtacttgcctccatcaaagaagggagcagctgcctcctgccggtgttagccaggcataggctctctgccctccctgcctgggctttgtgtattcttggtgttcaaaaggtatctcttgaatgatgtgtgaacaactggtagaaactcatcagcacttatggaaatagcacaccaagttgtcaactgcccgtaaaccctttgccatccctccggtggcagcatgttccccgctggtggggagaaagggccttgcttggtctcatggaccagccaggcaggcaaggaggccgcaaacacaggactaatagcaccctcgtggcctgcccccagccctcatttcagaacgtggcccttcctgaagccgctttagctggctgggggaggggtggggttggaggggtggagacggtagcggttctccaccttccctctgccccgctgtgccgcccagcagatggggagttagcacgtcacaggtgcagctccactttggtcacctggaggctctgcttgcaaatgtggggctggtgcttggaattcaagatgcccaataaaggatccatccacagcggctgcccacgggagccatctctctgtggctcccaggagccaggagggcctggagctggggacagggggaagttctgattttaaattggggaattctgacatcagcccagtctcgttccccagaaagaaactggtcccgtctgccgtctttccagatagttccttctggagcagaagtagtccaaattccaaacctctgattactgacatttgcggttagttttttggtattatttttatacaggaaaacttgttctgaataatgcaactttacacagacactctcaccactgggcctcaccaagtcctgattttcaaaacactcagagcccttcctgagctcacctgagagatgctgtctttggagtttgttcctgatgagttttagagagcttttctttttctttgtttctttgtttctttctctgtttctttctttttttatttttggttttgttttttgagatagggtctttctctgtcacccaggctgcagtgcagtggtatgatctccgttcactgcaacctcggtctcctggcttctagtgattctcctgcctgaacctcccaagtaacaggaattacaggtgtgcactaccatgcccagcaaattttttttttttttttttttgagacagagtcttgctctgtcacccaggctggagtacagtggcacgatcttggctcactgcaagctccgcctcccaggttcacgccattctcctgcctcagcctcctgagtagctgggactacgggcgcccgccaccgtgctcggctaattttttgtatttctttaatagaggcagggtttcaccgtgttagccacgacggtctcgatctcctgacctcgtgatccacccgccttggcctcccaaagtgctgggattacaggcgtgagccaccgcacccagcctccagctaatttttatatctactaaaagtagagatgggttttcaccatgttggccaggttggtctcgaactcctgacctcaagtgatccacctgccttggcctcccaaagtgctgggattacaggtgtaagccactgcacccttcttttctttcttttctttctttccttctctccctccctccccttcctccttctctccctctcacctttccttccttcttccttcttcctttcctttcctttcctctccttctccttccccttccccttcccattctcattcccttccttctctctctttctttcttttcttctttcctaaagcaggggttacacaaattaaggtgaaccgaatacatctatatttagcaagtgaatgctttaacttcaacacacatagatacttcctagaaaccctccccaacacagcgacaacaggctgcattgggggctcatcaggaatgagtggcctgggcagaatggccctccaacccctcgcactgccctgcccataaccggccctgcccttgagggcttttgggaaaaggtaggaggggcagaaataaccttgactttcagccaaggcagaagagccagaggatggctgctgctcctggcctgcgcactgcggctcctggaagccaagacgggcaggcttgtgtggccgcggtgagcaaggagggcagccatcccatgcagatgtgtgggaggggcggggaggcagccaggagtagctgtgtcaggcaggccaggccaaggtcctggactggcctccttgaaaagcagcccctcatccctgatagcccagggttgcggggagccattgggggatggtctgagatgatgtctccggaccccgtgcaggagttttgttacgacaaatctagtcccttctcagctcctatggtgacaagaagctccagctattttattttgttttgtttactttagagatgggattttgctgtgttgcccaggctggagtgcagtggccccatctcagctcactgcagcctcaaattcctgggctcaagcgatcctcccacctcagcctcctgagtacctgggactacaggcatgtgccacaacgccttgctaatattttgatttttaaaaaatttatttttatgtatttattttttgtgtggagatctggaattcttgggctcacacgatcctccttcctcggcctcccaaagcactgggatttcaggcatgagccccacagtccagccagctccagcttttatttactttttatttttttgagacaaagagtctcgctctgtcacccaggctggagtgcagtggtgtgatctcagctcacgcaacctccacctcctgggttcaagcgcttctcatgcctcagcctccagaatatctgggactacaggtgtgtaccactacacctggctaatttttgtattttttgtagagacagggtttcgccaggttggctgggctggtctcaaactcctggccccaagtgatcccccactttggcctcccaaagtgttgggattacaggcgtgagccaccgcacctggcccagctctaacttttaaacctgctcactggctggctctcttctcgacttcttgggacctgagttgtccttcatctctgtgacctacctgacaggtgtttctggggtccagcctgaagcacctggctggtgagatcagagtccaattctcaccctcttcccaggaccccctcccagctcctgagcctgtcaaccctggctatgcacagccctcgcctgagaagcgtcttcaaaattctagtgccttctcctcccttcaattccaggataatggcacacacagcaccagtcaggccctggcctgtgttgcaggcacacctccgatacattttgacctgcatgccaactgcagaacctaaacccaggcaggggtcactccccagcagggtgctgaggttcaaagagctcgaaggaaatacctgcctgggaagacaggtgacaggtgactgagttcctctccagaactttccagacaataatcaggctgtgtgtcaaattcaccaagatttagctccagacccagctgatctgcagccaggatgctattgggagcatcactgcttccgtctttgacccatctttccacgtggccccccagacagagagcacttccaacctatgcataaaaatacaggggaaaggccaggtgcagtggctcatgcctgtaatcccagtactttgggagaccgaggccattggatcacttgaggtcaggagttcgagaccagcctggccaacgtggcgaaaccccgcctctactaaaaatataaaagttagctgggcatggtggtgggcacctgtaatcccaactactcaggaagccaaggcaggagaatcacttgaacccaggaggtggaggctgcagtgagccaagatcatgccagttatacaacagcctgggtctgtctcaaaaaaaaaaaaaaaaaaaaaaagggagcagagcgggggaagaaaaaaaaaaaaacccagagagcactgttatttaccctgatgcctcattttcaagcatgcattgtgaatagagctgaccacagtagcacaggtctcaccgtaggcctccaggaacaccctgcaacctcagtctgcccctccacattcatttccaggaaactggagttgatcgttaattctcagacatcctttggtgcagactggaggatatcaatgaacatgaacacatgcgagagttcctgtacggagctgtggaccataaaccacgcatgctgtcccggtggcaagtcagggggctttctgggtagttctgctttctctccctgtatggagagttccacagtgactctggggcaggcagggttgagggccccttatcagtcacctggtccctcctctccttcccaatgtcacccccattctgctgacctcaatccctgctctccagctacagatacatttccttgatcttcaccttgaagcctgggcccttgctcttctctattcctggcacatcctcctcacagatctttacatagcaggttgattctcaccctttaagtcttgctcaaggtcacctcctctgagaaaccctccctgaccacccaggctaaaggaatccccgccacccctcccctcccacccgccccccgccgcacaaaatgcttcccacacctgccacatctgggtcagtctcctgtctgtagagtgcaagttcacagctctagttacagcagctacaactgtgtctggagctggggtactaccccatttaaccatctgttgattaatgcacttgattaacatcagaggacgtaaggtcctcgtaaagctaagaaagaatttaggagaatgactagggctggccacattagcaatggacccacagtaggaggcttcagggacaccctgcctgtgtccctccagtgttcactgctcccttgcatgagacccagaaaggggctggcactctgcttggggaaaggctctgcctccaggagactgctctgttgtgtgcagaacaagggggaagtgccagaaattaatggcccagggaacagccttcagcaatgatgaagagaagttggataagtagcccagctctcatgtctacgggatgggtcaaggctgagtctgcactgcctcccagaggccccagtagaggggctgcctgcagcagtatctgctcagtcatacacccctacacgtgtacactaggaaggaagtgctggcttccttcccttccctgctgcacacaacactccctgaaacatgcctgcaagaaccaccccttggctcagcagctttgcagtgatgaatccaacctctgcagaaaaggcaccctggtgttctaattcctgggcatggacaaactgccccgaggaggatgagaggtgtctccttcacctctgatgttgggtctcaggttcctgggtaaagggactcctttggtttcctggctcctgccccacagacaaattaaactggacaaggtgacaaaaggagtcatttggaaaagtcttgggacagggcttagtggctcatgactgtaatcccagcactttgggaagttgaagccaggagtttgagaacaccctgggcaacacagtgagactccatctccacaaaattttttcagacttagcagagtgaggtgacatgtgtctgtagcttcttgagaggccaagtcaggaggatcacttgagcctgagttcaaggctgcagtaagctatgatcgcaccactgcactttagcctgggcaacagagcaagaccctgtctctaaaaaaaaaaaaaagaaaaagaaaaagaaaagtcaggccgggtgcggtggctcacacctgtaatcccagtactttgggaggccaaggcaggtggatcacctgaggtcaggagtttgagatcagcctggccaacatggcaagaccccatctctactaaaaaatacaaaaattagctggtcttggtggtaggcacctgtaatcccagctactcaagaggctgaggcaggagaattgcttgaactctggaggcggaggttgcagtgagccaagatcacaccattgcactccagcctgggcgacaagagttaaactctgtttcaccaaaaaaaaaaaaaagaaggaaagtcaaagtcttgtggctaaagacggcaggtggaatgaggagtgggagagaagggcggggaaaggaggtgagatgcctggagaagttgaggtccagggaaccaactccacccagagcaagctctctgcaggcaggactcaagcaacagccgcagatgggagcaaaaaaagttttgctactcctccctcccagagatatttctaagagctccattttctttccagttggctaagaagcaaaaaaggaacaatagattcaagctgaaataatttgcatttatgatgaacacaaggaatatctaccttgcattttcctaaaaaagaaaaattaaaccccatttttaattaactgataaactattaatcaaatttttgcaatgttaggtgacacattattcatttagatagaatgactgtgaacttaaactaatcaaatctgatttgcccacataggcttgattgaaatacattttaactagcatatacaaagagaaaatcttggatttcttacctaatcttcagagtatactgctgagttaataagggcagttttttttttaaatgagaccaccatttcttcatctgcatatcaaaatcaagaggaacttaattgcaaaacacatattcctgaaatctaatcattacactgctttagggtattttattgaagcatgttaaattatggacagaatattaatgatgaaactaatcaaacccaattagtcacttctaacaatagtcacataaatatacaagtcaggtactaaagtactgtagatatgatgtaaaaatggttaaaatcttaaatgtatggaatatttatgaaatattcatgttgaatttaaagccaaaaattattggggtaagtcactttaaagaaaataaattaggcagtgtcctatactgtttgaccggaattcacaagttcacattttcttcaggtatctttgaatctaggagattagtgagtctataatcaatcaatcagcaaaattttaataagatgacttaccatattcatgacctagtatttcattcttgcatccagagacttttttttggatttttgttttctgactttttcaaggccttttggaaaggggtctccaggccttggaaaagcagatggagtggtggatgatttctggggttggggatttgccatccacactgtctccttccctgcctccagccccaggtgcagaacttgctctaggggcaaaagcagtgaggacagaacagaggagtcactgcccagggggcctcctcctcctcctctcatacctgaggctgcagaggaagctgaagggcccaggggagctcctggccttggcctgtgaggattcttggtggaagattccaggctggggagccaggccaaagcagacaggcagtactgggtctggggttccccaggcagagacctccctctgcttcagttcaagccagtcccttctggctacctgggcccagactccagcatccacacatatacagccagcagtttcatcacgtggtagctacagctgccttcttaatcaaggaggttgtcaagcctcaccatttgcttttctggcccttaccctgttctgctgtccactcctgatcccccatttcctccctccagacttctttccaggatgctgcattcctaccacgtgtgctgggaatctcagctcctggagaaagccggtcagcggctctgggccctgctctggccagacatctcaagtggagcaccacaggaaataggaaacattgttcattcattcatccatccacccatctatcccatccacccacccatccacccatccatgcatccattcacccatccatccatccatgtacccattcatgcacacatctatccatccatctacccatgaatctatcccatccatccacccacacatccatctacccattcatccacccatctatccatccatctactcatgaatctatcccatccacccacccatgcatccatctacgcatccttctgcccatctatccatccatctactcatgaatctatcccatccatccacccatgcatctgtgtacccattcaggcatccatctatccatccacctacccatgcatctatcccatccacccacccatccatgcatctagtcatccatccttccatccgtccatccatccatccatccatcaatccacatacccattaatccacccgtctatccatctacccatgcatttatcccatccatccacccatgcatccatctacccttccatccacccatctatccatccatctatcccacccacccacccatccatccatgcatccatgcatccatgcatccatgcatccttccatccatccatccacatacccattcatccacccatctatccatccatctaccaatgcatctatcccatccatccacccatgcatccatctaccaatccatccacccatctattcatccatctatcccacccacccatccatgcatctattcacccatccatccatccatgtacccattcatccacccatctatccatccatctaccaatgcatctatcccatccatccacccatgcatccatctaccaatccatccacccatctattcatccatctatcccacccacccatccatgcatctattcacccatccatccatccatgtactcattcatccacccatctatccatccatctacctacgaatctatccatctatccacccattcatccacccatctatccatgggtaggtagatactcatgcatctatcccacccacccacccacccacccatccatgcatgcatgcatccatccatccatgcatcaacccacccttccatctatccatccatccatccatccatccatccatccatccatccatgcatcccataaacatttaccaaagacaaatatgtcccgggcccagtgctggactctccccaagcctggggagcatattaaagaagtagactttgtgttgctttttcccgcatggcatgcatgctcctgcttcagagaaagacatctgtattgtcccttgaaggacccctctgccccacttttattccctaaggtctagggggctgctccatcccctcaatccactggccatgtgatccaggcctgccctagtccctgagatgggctcacaggtgggtacatgaccagggtgtcatcctggcacttttgctggaactaaaagaggagataagccctttgctgcttggggtctcttgggggagaggttgggaccatgacatggagatggcctgcctgagactgaagccgacagaggagaggaggccaagtccttatgacatcgactgggctcccggagcccactctgcctggaagtttccacttacctgagccaataatattttttcctttagccaggttgaattgtattttctgtcacttacaaccaaaggagtcttggctcatagagaagataaacaggaaagacactatccaatgccacttcctccatgaagtcttccctgattcttgccagctccattggatattttcctgcttagaagcctggcgggggaggagggattgttcttatggatctctcatgaccttagctttttatgccttggagtataaaggggaaatctgggtgcaaagcctgtatatgcatttgagtggggacaaagcagcagaaagaaagatacagagttaagcacaagatcttagcggaagatgaaaacctcagccaaatataagtgggggactctgcagtgaggcaagtggacacctcagaggacatgggagtgagagtggtgttgaaatcacccagttctaagctacagggagagggtagtgctcttggccttggtgcatatctgtgacccaggtcccctatccaaccatgagcctccaacgcaggcaagaagccggcctcttccttccagcctcctggcaccatcaggaagggttgcttggcaggccacctccggactttgatgcagaatgtccccaggttctataagcctccaccctcgagttcccaaaggctctacttgagatgttgccttgggtcaatgtgtggcctaggttcctggtccattggtgcatttccatagcaggttaagctggaccttggtaaagtgtcacatgtacttttttttttttttgagacagtctcgctctgtgtcccaggctgaagtacggtggtgtgatctcagctcactgcagcctccacctcccaggttcaagcgattctcctgcctcagcctcccgagtacctgggtttacaggcacccaccaccatactagctaatttttgtatttttaatagagatggggtttcaccacgttggccagattggtcttgagctcctgacctcaggtgatccaccagcctcagcctgccaaaatcctgggattaaaggcatgagcctccacggccagccttgaggccattttaaattcatcctatcatcacatgattctgatcttcttccctcccaagactgggtttcttgtaggaggcatggctgctgtgggtttcaggtaagcaacttagcctcagtgtctttatctgtgaaatggacatcatgatggctaacccatggcatttagacaatgcaagccagcttttttttagccttgtagggtccagacccgatgggtgaaccatagtctgtctctttgcaagcagtcaggcctggacctgtgctctcatttttgtcaagaagaagagagtctgtactgatgaaaccagaatctatttcaagtcaagcagaacttctccggaagctggggtagcatcccatgtccccacaatttgctgcagggggagctggggcaccccaaggaaggtccacttttccctgccaggaagctgaggaggcagtgggggcataggtgcttccttcatctctccattttgtgtggctgcagaatttgtgcacagccctggtggcatcatagttactcctgccacccacctggcaggcctccattgcttctaaatgcggtccaggcctctttctgccctctccctcccagggcctggacagacccatggaggggaggcgggtcccagggtcagggcaggctgataccttggaaagaaagcattgtgtcatcagagacacacatgggaggatgatttatttctgctctggactgccacagcggtctggccttatctctgttttgcaaggccccccggcccacgtgctcaaccactctgcttcactctagaaagaagagaaccatttagatgactgactgaattttcctggaaatctggccctccatagatcttcctggaaacatctggagcttatttgtaagctgttgaggcaccatcaaatcccacatcacaaagagatgcacccgttttaaatgaacttagagaagatttggcgaatccatactccagtctacttaggctttaaaccgtcttttattttttctcactctgtcacccaggctgaagtgcagtggcactatctaggctcactgcaagctccgcctcctgggttcaagccatcctagtgcctcagcctcccagagtagctgtgactacaggtgtgcaccatcacgcccggctgatttttgtatttttagtagaggtggggtttcaccatgttggccagcctggtctcaaactcctgacctcaagtgatctgcccgcctcagcctcccaaagtgctgggattgcaggcgcgagccaccgtactcagccagaaataggttttaaaccttccaaactacttaattttggaggattttgattctattgattgaaaacataaaaatgcaactcttctcattcaaggagcacaaaccccgactgtcatcagggaagattggcatctgctggccggatcgtcacagaattcttggtccatttgtatggctggtgggaggcgtggtcactgggaggggagcaccatgacccagcggtgcccgggctctgtgggagacacatgtctccctgaagtgcctgtttagttatcaagccattaaaccaagtatcaaaataaaatgaactcagaaccaggctttcaaattgctgcatcacgaagtgttaatcaagattttcaaaaataatgaagcacatttaatcacattgccattcactaagagtatcataattaatatttgggtgagagtaaaaagattgtgttgttaataaataagttattttaaatattgtttatctttagcttatccttaaaacatctagtcagtgtatgttttattataaacatagtaaaatagtaccatagtacatgcgtattggtggcacgtctttgggatctcctaaaagcacacctgagttaaggaatgggtgcaggtagtttatttgggagttgatttcaggaagcatgagggagggagtaggggatgagggagggagtagggaatgagggagggagtagggaatgagggagggagtagggaatgagacagggggccaggcacggtggctcatgcctgtaatcccagaactttgggaggctgaggcgggcagatcgcttgaggccaggagttcgagactagcctggccaatatgacaaaaccccatctgtactaaaaatacaaaaattagccgggtgtggtggtatgcacctgtaatcccagctactctggaggctgaagcagaagaatcactggaacccaggaggcagaggttgtcgtgaactgagatcatgcaactgcactccagcccctgagtgagagagtgagactctgtctcaaaaaaaaagacagggagggtgcattcaggacaggctcaccccgctccacggggccttctgagagatcaggtagaatgcattcaaattgtcccattgaggaatgaggaagctgggatatcttccccctatttctgtcctttcttggtggagagttgcccttaggataactccccagtactttcaggctgccctccatgctgactagcaagcaaaaatcatttagcttaaaaatcagaggggacacggtgaaaccccgtctctactaaaaaaaaaatacaaaaaattagccgggcgtagtggcgggcgcctgtagtcccagctactcgggaggctgaggcaggagaatggcgtgaacccgggaggcggagcttgcagtgagccgagatcgcgccactgcactccagcctgggcgacagagcgagactccgtctcaaaaaaaaaaaaaaaaaaaaaatcagaggggaggccaggcacggtggctcacacctgtaatcccagcacttcgggaggccaagtcaggcagatcactgggggtcaggagttcgagaccagcctggccaacacagcaaaaccctgtctctactgaaaaaaaaaaaaagccaggagtggtggtccacacctgtagtctcagctacttgggagactgaggtgagagaatcacttgaacacagtaggcagaggtggcagtgagccaagatcatgccactgcactccagcctgcatgacagagtgagactgtgcccctcaccccgcacccccccaccacctaccgaaaaaaaaagcagagaggagaaaaagctagtggtgggaggcttgcatgggcagtgtctaccacagctacgggtgaacccagaggtgggctgaggagctgcagggtgggccagtgacaggatctgctgaaagatctgtgcttgtggccaggtgtggtggctcacgcctataatcccagcactttgggaggctgaggcgggtggatcacgtgaggtcaggagttcaagaccagcctgccaacatggtgaaaccctgtctctacaaaaatacaaaagttagctgggcatgatggggggatgcctgtattcccagctactcgggaggatgaggcaggagaattgcttgaacctgggaggtgaatgttgcagtggcgcatgtcgccattgcactccagcctgagcgacagagagagactccatctcaaaaaaaaaaaaaaaaaaaaaaaaaaaaaaaaaagagagagatctgtgcttgtaaacatttggctgaaaagggtgaataaccaaacactaggtaaggctggcacagtggctcacacctgtaatcccagcactttgggaagctgaggtgggaagagtgttttagaacaggagttcaagatcagcctgggcaatgtagtaagactgtttctatgacaattttgttttaaataaaataaaaattagcagggcatgtggtgcacacctgtattcccaggtatttgggaagctcagcggtaggattccttgagcccaggagttcaaggcagcagtgagctatgattgtgccgccgcactccagcctgggtgacagagcaaaatcttatctccaaaacaaaacgacaaaacaaaactgaatggagactactcatcttgagatttttatgaagtggcaatgaactggtgatggggagtaagtgctatttgaatccaatctccacccttgttattaacaacgaaagctcaccagcgtgcccccaccccccaccatccaccccttgtcccttggcacccagcccaggttatttcactggtaaaatctgtcaaatcctaaaggacaagaaaataattgtgccgctttgactgtcccagagcataggaaaagacctgctatgtccctaaatgaagacttactgttggaatgatgtgcattccccttggattagtctacaaatttagtgtaattccaatcaaagcaaagggaaactcattctgtcaaaatttttatgcctttcttttaagagctcctgaaaggcacccctcgatgcctttgaattttatttttttaatcaagttaattgaggtataatttccatacaaaaaaaagtgcatccatttgtagtgtgcactttgatgagtttggcagacgtgtgcacccaccaaaagcaacactacgactgagacacagaacatttccaacacccccaaaagtttctttatgctttcttcagtcccctccccaacacctggccacagggaccactgacctccttcctgttactagagattagtttgcattttctagattttatgtaagtggaatgatgccatgtgcatttttttgtgtctggcatttttcactctgcatggttatcttggtgtttagccacgtggtctgttcacacatattaccaagtactttcctgttgtacagatataccatattttgtttgtcaattcacctgttgttttgtcatttatgttgtttccagtctttctctggctcttgtgaataaacaataaacattttaatttttatttttattttttttttttattttttttttttaaaggacatatcatatttattcatacacatgctggaattattggtgcagacatttaaatacattttctttgagaaagtccttttttttttttttttttgatggagtttccctcttgttgcccaggctggagtgcaatggtgcaatctcagctcacaacaacctctgcctcctgggttcaagcaattctcctgcctcagcctcccaagtagctgggattacaggcatgcaccaccacgcccagctaattttttttatttttagtagagacggggtttctccgtgttggtcaggctggtcttgaactcctgatctcaggtgatctgcccaccttggcctgccacagtgctgggattacagtcgtgagccaccacagctggcctgggaaagtccattcttttttttctttttttttttttttttaaatttatttttttattgataattcttgggtgtttctcacagagggggatttggcagggtcatgggacaatagtggagggaaggtcagcagataaacaagtgaacaaaggtctctggttttcctaggcagaggaccccgcggccttccgcagtgtttgtgtccctgattacttgagattagggattggtgatgactcttaacgagcatgctgccttcaagcatctgtttaacaaagcacatcttgcactgcccttaatccatttaaccctgagtggacacagcacatgtttcagagagcacagggttgggggtaaggtcacagatcaacaggatcccaaggcagaggaatttttcttagtgcagaacaaaatgaaaagtctcccatgtctacttctttctacacagacacggcaaccatccgatttctcaatcttttccccacctttcccgcctttctattccacaatgccgccattgtcatcctggcccgttctcaatgagctgttgggcacacctcccagacggggtggtggccgggcagaggggctcctcacttcccagtaggggcggccgggcagaggcgcccctcacctcccggacggggcggctggccgggcaggggggctgacccccccccacctccctcccggacggggcggctggccgggcggggggctgaccccccaacctccctcccggacggggcggctggccgggcggggggctgacccccccacctccctcccggacggggcggctggccgggcagaggggctcctcacttcccagtaggggcggccaggcagaggcgcccctcacctcccggacggggcggctggccgggcaggggggccgaccccccccacctccctcccggacggggcggctggccgggcggggggccgacccccccacctccctcccggacggggcggctggccgggcagaggggctcctcacttcccagtaggggcggccgggcagaggcgcccctcacctcccagacggggcggctggccgggcggagggctgagccccccatctccctcccggacggggtggctggccgggctgaggggctcctcacttcccagtaggggcggccgggcagaggcgcccctcacctcccggacggggcggctggccgggcggggggctgacccccccacctccctcccggatggcacggctggccgggcgggggggctgaccccccacctccctcccggacagggcggctggctgggcgggggggctgaccccccccacctccctcccggacggggcggctggccgggcggggggctgacccccccacctccctcccggacggggcggctggccgggcagaggggctcctcacttcccagtaggggcggccgggcagaggcgcccctcacctcccggacggggcggctggccgggcaggggggccgacccccccccacctccctcccggacggggcggctggccgggcggggggccgacccccccacctccctcccggacggggcggctggccgggcagaggggctcctcacttcccagtaggggcggccgggcagaggcgcccctcacctcccagacggggcggctggccgggcggagggctgacccccccacctccctcccggacagggcggctggccgggcggggggctgacccccctacctccctcccggacggggcggctggccgggtggggggactgacccccccatctccctcccggacggggtggctggccgggctgaggggctcctcacttcccagtaggggcggccgggcagaggcgcccctcaccgcccggacggggcggctggccgggcggggggccgaccccctcacctccctcccggacggggcgactggccgggcagaggggctcctcacttcccagtaggggcggccgggcagaggcgcccctcacctcccggacggggcggctggccgggcaggggggcagacccccccccacctccctcccggacggggcggctggccgggcggggggccgacccccccacctccctcccggacggggcggctggccgggcggggggccaacccccccacctccctcccggacagggcggctggccgggcggggggccgacccccccacctccctcccggacggggtggctggccgggctgaggggctcctcacttcccagtaggggcggccgggcagaggcgcccctcaccgcccggacggggcggctggccgggcggggggccgaccccctcacctccctcccggacggggcggctggccgggcagaggggctcctcacttcccagtaggggcggccgggcagaggcgcccctcacctcccagacggggcggctggccgggcggagggctgacccccccacctccctcccggacagggcggctggccgggcggggggctgacccccctacctccctcccggacggggcggctggccgggtggggggactgacccccccatctccctcccggacggggcggctggccgggctgaggggctcctcacttcccagtaggggcggccgggcagaggcgcccctcacctcccggacagggcggctggctgggcgggggggctgacccccccccacctccctcccggacggggcggctggccgggcggggggctgacccccccacctccctcccggacggggtggctggccgggcgggggggctgaccccccacctccctcccggatggggcggctggccgggcggggggctgaccccccacctccctcccggatggggcggctggccgggcggggggctgacccccccccacctccctcccggacggggtggctgccgggcggagacgctcctcacttcccagatggggtggctgccgggcggagaggctccttacttctcagacggggcagctgccgggcggaggggctcctcacttctcagacggggtggttgccaggcagagggtctcctcacttctcagacggggcggccgggcagagacgctcctcacctcccagacggggtctcggccgggcagaggcgctcctcacatcccagatggggcggcggggcagaggcgctccccacatctcagacgatgggcggccgggcagagacgctcctcacttcctagatgtgatggcggctgggaagaggcgctcctcacttcctagatgggatggcggccgggcggagacgctcctcactttccagactgggcagccaggcagaggggctcctcacatcccagacgatgggcggccaggcagagacactcctcacttcccagacggggtggcagccgggcagaggctgcaatctcggcactttgggaggccaaggcaggcggctgctccttgccctcgggccccgcggggcccgtccgctcctccagccgctgcctcccgggcggcgctcgccggcgcggcggcaaagactgagacagctccgctgcccgctgaactgcatcctcccggcggtcgggcggcggcggctgcggtcggtcgcggcagcggctccgcttcatatctgcagctggggcccgcgggcgtcagcgccgcgactgtcctggctccgcactgccccgggccgcagcgcagccgcgccaaccaccagccgcggccaccatggccggacgggctccctaagccaccgaccccagcccgcggcgccttcgacccttctggggcctccggcgccgcgacctcctctgcctgaaatttcttttttcttttccttttattttattttattttttgagacggagtcttgctctgttgtctgggtggagtgcagtggtgcaatctcggctcactgcaacctctgcctcccaggttgaagcgattttttctaatttttattttttattgtttttttgagagagtctcactctctcgcccaacctggagtgcggtggtccaatctcggctcactgtaacctccgcctctcaggttcaagcaattatcctgcctcagccccccgagtagctgggattacaggcatgcaccaccttgcccagctaatttttatacttttagtagagacgggtttcgccatgttggccgggctcatctcaaccactgacatcaggtgatccacccaccttggcctctcaaaatgctaggattacaggcatgagccactgtgcccggctgaacatatttggttagtttgttcaaagcagaagaaacctcagacactgcatggttttaggctttggccctaccatcctcgtgagcttcctgtccaggaggatcatgaatgccccggttctactaagtgcggaccccaaggtccttcccacccccgagccaactgctaaattcccttactagtcctagcaattgttttgtagagtccttagagttctttatgtaaacaatcatataatttccaggggattcttcctttccaatatttatgtattatatttcatttcatattattattgtattttatttcattttactttatttttatttacttaatgtctaactgcaatggctaaaacttccaagacaatattgaataaaagtgttaggagtaagcattcgtaccttgtctccagccttgggggaaagcattcactatttcgcctttaaggatgattttattttttattttaattttattatgatttttttgagatggtgtcttgctctatcgcccaggctggagtgcagtgtcgcgatctcagctcactgcaacctctgcctccggggttcaagtgattctcctgtctcaccctccctagtagctgggattacaggcttgtgccaccatgcctggctaatttctgtatttttagtagagattgggtttcaccatgttggccaggctggtctcgaactcctgacctcaagtgatctgcctgcctcgggctcccaaattgctgggattacaggcgtgagtcactgtgctcggccaaggatgattttaactgtaggctcttcaaaggtgtccttgatcagattgaggaaattcccctctatttctattctcttctatttcagtttgctaaaaaagttctttaaatcatgaatagatgttaaaatatgtcaagtatttttctacatttattgaaatgatcattggtttttctgttatattctgttaacatggtaaatggtattgactttttttttttttgagacagggttttgctctgttgcctaggctggagtgcagtggcgtgatctctgctcactgcagcctctgcctctcaggttcaagcaattctcctgactcagcctcctaagtagctgggattacaggggtgcaccaccacatgggctaatttttggtagagatggggtttcaccatgttagccaggctggtctcgaactcctggcctcaagtgatccacccgcctcggcctcccgaagtgctggaattacaggagtgaacactgtgcctggccttacatttatttttaaatcttaaattaaatgtctttgtcagattttggtgttaggtgttgctggtttcaaagcaggggatgagaagtgtcccctcttattgtgtctgttttgcaaaagggtgtgtgagattggtgctatttcctccttgaaattataataggcttcaccagagaagccatttggaccctggagttttctctcttggaggatgtttaactaccaattcaaattcattagtagatccataggacttttcagattttgttgcattttgtcttaattttggcaagttgtagttttcaaggaatttgtccatttttctgtttgtcttgatcagtctggctggatgtttatctgttttgctgctctttccaaagaatgaaaatgaacacctgtggagcagccataagccagtgcacatccaggagcccagcccactggacctgcagcttgcagcacagccaccctgcagagcacagcctcaattagccagttcccagccaacccacggagacaggagccaggagagatagctgagttttgggggtggcttgttaagcagtaatagctgactgatacagttaatgggtatacactttatttaaccagttccctacagatggacatttagcaaagtgaattatttcgagagaagcttggctccatttaaaaaacatttctgggcttggcgcagtggctcatgcctgtaatcccagcactttcggaggccgaggggtggatcacttgaggtcaggagttcaagatcagcctggccaacatggtgaaactccatctctactaaaaatacaaaaattagctgggagtggtggtgagtgactgtaatcccagctacttgggggattgaggcaagagaatcgcttgaaaccaggaggtggaagttgcaatgagctgaaattgtaccactgcactccagcctgggcaatggagcaagactccttcttaataactaactaaataaataaatattaaaaaaaaatttctgaccaggtgcagtcactcacacctgtaatcctagcactttgggaggctgaggcaagaggattgcttgagctcaggatttcaaaaccagcctgggcaacatagcaagaccgtgtttctctctttctctctctctctctcaatatatatctctctctctttctatctctctcattttctctctctctctttctctctctctctctctctctctctatatatatatataaattccttaagatctatttctagaagaattgcagtcatggtttacatatttataattttaaaacatattcctaaattatgctcaccaaagctatgctgtttcacatttcagcaatttataagcatcaattttcctcatattttccaacattgagtgttgaaatatttaattttctgcaatctaataatgaaatgtaatatcaatttaaatttgcattcccctgagcattagaggagttgaataaacttttcatatacgcattagccatttatttttcttcttccctgaattgcccttcgtcttgtttgttctcttttgtagtgttttgtcttttcctatttgtaggagatgtttatataactggatattaatcttttgtctgctaaaagtattgtaaatattttcttgaattataagagtttctaaaaaaactttgtagcatcttttattggagaaaagtttattatatttacacagttaaatctgataattttttttaatgctattatatttgcctaagaatatttttcctattctggctgggcactgtggctcactcctgtaatcccagctctttgggaggccaaggcaggcagatcaccttaggctaggagcttgagaccagcctggccaacatggtgaaattctgcctctactaaaaataatatgaaaaattagccaggcatggtggtgtgcacctgtagttccagctactcaggaggctgaggcaggagagaattgcttgaaattgggaggcatggaggctgcagtgagccatggttgtaccactgaactccagccaggcaacagagcaagactctgtctcaatatatatatatgtttttcctattcaaaaactataaacattaatcatattttcttctgttataatactttttattgctttgggtctataaattatctgacacttattttggggttattatttttagtataagattcttttccaaaacaacaggcagttcttccaacagtgtttataatttcattacttcctctttaattcgaaatgccaaatttaaactagtttttaaataaaggttgtttctggaatttctcttctactgatccctcatggcattatatcaatattatgctgttttactgctgatttttttttctttttgagatggtgtctcactctgttgcccaggctgtagtgcaatggtgcaatctcagctcactgcaacctctgcttcccaggttcaagcgattctcctgcctcagcctccctagtagctgggactacaggtgcgcaccaccatgcccagttaatttttgtatttttagtagtgacagggtttcaccatgttggccagtctgatcttgaattcctgacctcaagtgatccacctgcctcagcctcccaaaatgctgggattacaggcatgagccaccatgcttggcctgtatggatgttttattctgatatttactcttccaaatgagcttgcgaatattaacaaattcataataaaatgtgcgtggattttgtgtgggattgtatcaaatatgtagactatttgtagagaatcatagtttgatagcattgagtcgttgcatttgatttatatcctttttttttttttttttgagacggagtcgcccaggctggagtgcagtggagctatctcggctcactacaagctccgcctcccggggtcacaccattctcctgcctcagcctcccaagtagctgggactacaggcgcccgccaccacacccggctaatttttttttttgtatttttagtagagacggggtttcaccatgttagccaggatggtcttgatttcctgacctcgtgatccacccgtctcagcctcccaaagtgctgggattacaggcgtgagccactcgtccagcctgatttatatcttgatctttagaatttcttattttaatgatcttcagtaaaaattatttggttttcttaccaaacacagcatgttctcactcataagtgggagttgaacaatgagaacacatggacatagggaggggaacatcacacaccggggcctgtcgggcagtggggggctaggggagggatagcattaggagaaatacctaatgtagatgatgggttgatgggtgcagcaaaccatcatggcacatgtatacctatgtaacaaacctgcacgttctgcacatgtatcccagaacttaatgtataatttaaaaaaattatttggttttcttcaggtaggttttgcacaattctttttttttttttttctctttttcaagagataggattttgctctgtcacccaggatggagtgcagtggcatgatcatagctcactgtaacctccaactcctgggctcacttgatcctcctacctcaacctcttgatcagctgggactaagggtgcatgccaccatgcttggctaattttttatttgaatttttttagagatgagatctcttgctatgttggtctggctagtctggaactcctgatctcaagtgatcctcctgcctcggcctcccaaagtgccgggattacaggcatgagctaccacacccggccacagttcttgctaggtttaattctagagtttgtttttgttgttctgtaatgaatctactgacatgaaaatctttttctgacatattaaggccaaaacttaggttaatagcattcatgatatattctaatttttgcaaagactgtatctacatatatggatagctgtatatgtaggaatctttagttgtaattttttttttttttgagatggagtctcactcttgttgcccaggctggagtgcaatggtgcgatctcagctcaccacaacctctgcctcccgggttcaagtgatctcctgtctcagcctcccgagtagctgggattacaggcctgcgccaccacgcctggctaatgttgtatttttagtagaaacggggtttcacagtgttggtcaggctggtctcgaactcccgacctcaggtgatcctcctgcctcggccttccaaagtgctgggattacaggataattgtttatttacttctctgtctccacttggttgatgtgttttaggaaaggaactatattttgacgacttcatgtctaacacctgcatagcacctggcacattggtagctcaaaaatcctttttacatgaatgaatgaatggaataaagggatagtgaaggacctacattgagcgatgacagtgtcttttccttcagtgcatggcatttgttgattcctttatttctgcttccttgtattttctgatttttcttttgtgatcatgtattctgttgtgatttaaagaacagaaagaaaaagatattcacttggaaaaagtagaaccataatgaaagagcaccacaaggtgtacctcatatactactagtaaatttttttctttccacttgagacagtgtctcactctgtcacccaagctggagtacagtggcaagatctcagctcaccgcaaactctgcctccagggctcaagtgatcctccccgctcagcctcctgagtagctgggaccacagacacacaccaccaaacccggctaattttttgtagttttggtagagacggggtttcgccacgttgcccagactggtcttgaactcctgagctcaagtgtaaatttttaaaatgagaaaaacaggctgggtgcggtggcttatgtttgtaatcccagcactttgggaggccaaggcaggtagatcacctaaggtcaggagttcgggaccagcctggtcaacatggtgaagcccagtttttactaaaaataccaaaaaattagccaggtgtggtggtgcatgcctgtgatcccagctactcaggaggctgaggcaggagagttgcttgaacccagaatgtggaggttgtagtgagccaagattgtgccactgcattccagcctgggcgacagagcgagactccatctcaaaaaaataaaaataaaaataaaatgagaaaaacatatgcagttcctaaaatggcttagggtgcaggccgtcacctcctgggtgattcccatttcagtggcgtggctttgtggtctgtaaatgggcttcgtcctgccttgctggtgccccttaccacccctgctgtgcagggcaagggttggcttgcctgctgctcctggctccaggccctcagcaaaggcccagcacagttcaaagggactagagggaagccagggaaagtaattctttagtctccgaggttgttttaacattatgatgatatatggcatatgttgctacaatggctgggcacatttacacggagggcagaccgggaggcccttagggctgggagggccaccaggtcaataatatatgcaaccggcaaaagaaaacatcgacctcatttcctccagagagcagacaactgtaaccctggagtcctggtttgcatgtaaataatgagcaagatactgcgtggccacttgtatcattgaggggagagtgagacaagaacaagaaagataaattagaaaaatatgagggcaccacttatggatctgtacaaggaagtgtcattcttcaggttaattttgcttcctctagaaagcagctcagtgttggtaggcttctatgtctgagattttaaaatggctttggtatgattattatcaatgaaataatcactgtcagtaacaaaaaatcagtttctcgagaggatgactgacgtgcggttgcagcatttggccccggggcccattaaatcctgaccaaagtgctgaagagttgccccacaaatgatttggctacactgggaatcacccggaaggaggccaagggtgtgtaattctggggaagtttggcggcagcctagggcctcctcaatctgaaagctcttgtttcgctttgtaaagcgtttgcttgtttctttttctttctctctttttttctttctttctttttctttcgcctgcctccctccctccttccctccctcccttccctcctctctccgtccctccttctctccctctcctgcctctctccctctctcccccctttctctttccttcctccctccctcccttacttcctccctccctcctctccctctcctgcctctctccctctctcccccctttctctttccttcctccctccctcccttacttcctccctccctcctctccctctcctgcctctctccctctctcccccctttctctttccttccttccttccttccttccttccttccttcctccctccctcccttcctccctccctcccttcctccctccctcccttacttcctccctccctcctctccctctcctgcctctctccctctctccccctttctctctccttccttcctttcttcccttcctccctccctccctccttctctccctctcctgcctctctccctctcttccccttttctctccttccttcctttcttttccttccttccttcctttctttcctttctttctttctttcgccttcctccctccctccttccctccctcccttcctccctccctccctctcctgcatctctccctctctctcccctttctctttcctcccttcctccctcccttcctccctcccttccttcctccctccctccttctctccctctcctgcctctctccctctctccccccttttctccccttccttccttcctttcttttccttccttccttccttcttccttttctttctctctttctctttctttcctttgccttcctccctccctccctccttccctccctccgtccttcccaccctccctccttccctccctcccttccttcctccctctctccttctctccctctcctgcatctctccctctctctcccctttctctttccttccttccttcctctctcccttctttcctccctccctccttctctccctctcctgcctctctccctctctccccgcttttctctccttccttccttcctttcttttccttccttccttcttccttttctttcttttctttttctctttctctttctttctttctttctttctttctttctttctttctttctttctttctctctttctttttctttctttctttctcttttctgtctctctctctctctctcccccacctttttttttcagacagggtcttgctaagttgcccaggctggtctcaaactcctggcctcaagtgatcctcctgccttggcctcccaaaggaggaattattatcactattttgccttagatgtgataatggttgtatttttacatacttatgttttggagatacctgctgaatattgatgggtggaatgatagaatttaggggatttgcttcaaaatagctaggggaggcagtagggggaggtacagaagaaatgaaattggccatgaagtgaccattgctgagtccagatgatggatacatgggggctcactatgctgttctacccttttacttgcttgaaattttttataagaaataaagcttcccaggtggttctgatgatcagccagagctgggaacccctggcttggctgatccgcagaggctgattcctagctattattctctgaccttccatgtcgcagaaattatgatggtaatcagaactggatcatgtttcctctctagtttggaggaggtcatgagataccttaacaagaaaagggtctgggggaccggcatggtgtctcacacctgtaattccataggccaatgtgggtggatcatgaagtcaggagtttgcgaccagcctgaccaacatggtgaaaccctgtctctactaaaaatacaaaaattagctgggcatggtggcactcacctgtaatcccagctactcaggaggctgaggcaggagaatcccttgaacccgagaggcagaggttgcagtgagctgagatcgcgccactgcactccagcctggcaacagagcaagactctgtctcaaaaaaaaacataaaaaaaagaaaaaaaagggtctgaagggtctggggaaaggtcccctgacaaatcagttcatccaggacatgaactgacctgcaatccgctcggaataggatgtcggatcaaaattgtcttgttccttagagaaatagcctcctttcccataaaaagacaggaggagatctatctttatttatttatttgtttttaaaaacagagtctcactctttgtccgggctggagtgcagtgacaagatcatagctcaccgtaacctccaagtactgggcttaagtgatcctcctgcctcagccttccaagtattcttgactacaggcatgcatcaccactccaggctaatttttaattttttttgtagagagatggggtcttgcaactttgcccaggctgatcttgaactcctggcctgaagtgatcctcccacctcagcctcccaaagcactgggattacaggtgtgaaccttcacgcccagctttctatctttattttgaaaagtaaaataaatacaaattattagttcattgatttattgaactaattatttattggattgctactgtatgccaggcactctgccaagctctatcgaagttctcaaagtttaatttggggcctggcatggtggcttacacctgtaatcccagcactttgggaggcagaagtgggtggatcacttgcagtcaggagttcgagaccagcctggccaacaaggtgaaacctgatctctactaaaaatacaaaaattagctaggcgtggtggcacatgcctgtagccccagctacttgggacactgaggcacgagaatcacttgaacgtgggaggtggaggttgcagtgagccgagatcgcacttcagcctgggtgacagagtgagactctgtctcaaaaaaagaaaaaaaaaagttgaatctgtagacctctgggatcccagagattctttcaaggggtctacaaggtaaaaaccattttacaatttatatttatttacgataatactaagatgtcatttaccttttattttggtatttgcacagatggtataaaaccaacagcgagtaatactgcttgtacttgacgttaatttgtcagtggcactgactgtactagaactcattgtattcttcaccactcacagtttatttatttatttttactttttattgatttttatgttttgagatagaatctccctctgtcacccaggctggagtgcagcagcacaatcatggctcaccacagccccaattgctcaggctcaagcaatcctcccacctcagcctcccgagtagctgggaatacaagtgtgcgccaccacaaccggctaacttattttattttatttatttatttatgacagagtcttgctctgtggcccaggctggagtacagtggtgcaatctcggctcactgcaacccccacctcccgggttcaagcgattctcctgcctcagcttccctagtagctgggactacaggcatgggccaccatgcctggctaatatttgtatttttattagagacagggtttcgacatgttacccaggctggtctcgaactcccgacctcaggtgatctgctcacctcagcctccctaagtgctgggattacaagtgtgagtctactcacagtttaaaacaatccactttcacttaagaatgttcctaatgaagcagtaagaattagtgttattaaatttgaattctcgagtccacttctgaagattgtgacggagtgaacacagaacaggattccgccacacactgggtacaatggcttttcaaggtgagacactggtgcagttgcttgagttgcgagctgaactagctgctttttatcatggcacactgttttacttggaagaaagttctgacacatcaaagtacagatattcagactctggtatttggcagacattttctcaaaaatgaacaaaatgagcctgtcacttcaagggaaacaactggcagtatgttttgccaatgataaaattcaagctttcaagttgagcattaggattttgggaaaacttgttatctgccaccaagagcttgacagcttctcaatttctttctttctttcgttctttcttttttgagatggagtttcactcttgtcgcccaagctggagtgcaatagcaaggtctcggctcactgcaacctctgcttcccgggttcaagcgattcttttggctcagacacccaggtggctgggattataggcgcctgccaccatgcccagctaatttttgtatttttagtagagatggggtttcaccatgttggccaggctggtctcaaactcctgacctcaagtgacccacctgcctcggcctctcaaagtgcagtgctgggattacaggcatgagccactgtgcttggacagcttctcaatatttagataccttttagatgagatcactagtgatatttttaaaatgtgatttttgatattgtataataaaactgacatttggaagttttgcatagcttagcgaaccaacattttccaaatgaccaatgcgtgatgttacaaaatcattcaaagtgcaagatggatattaccaagtaatccttctcccacctaggacacagtaagggagaaacagcagttgtcccaccctagcaaaagcaggaaaattgcaaaagcaaagagccaggaaacctcaaaagcaaactttttcttgaacctactggaaagctgaaggggcagggcaactgtgtagcctgaaatctaaggaaagacagttgcctccccagtgatagatgggacatgagcaccagcttacctgtgtgcagtacaagaggaagaggttcctggtgccatgcacgagagaaaacattatttagctaacatttttagcaaatttgctggagcctgagtgcaaactagagtaggcatataaagtcctgggcactgcagactcaaggagagttttcatagacctccagtttatgagaaagaccaggagcagagcaggacaccagagaccacctccctcgttggtacagggctagaggatagtgacaactgaagacaacgaggctcatttggaaaggagagctttatttctcataaagggttgcagcctgcagagtggccattctgacaggctgggaagcatagcctctggtcacaagccagaaacagtcacttcaagggaggagcaaagggaataggaatttatgctgagcgggatggctgaacatacatatttaataagatataggagtcatgaatatttatgaaaggagaaacacatgtgcaagtgtgcttcatgtcccttcatgggtcccatgtacaaaaacatggcagtatcagcctgattcaagggtggagttttcagccttctgatatcaaaaggtgacatgaagatgtagaaacctttattgagcattctccatggactgaccagaccatggaggtctcttatcaggtaaaaaagaaggagcagcctcaggtggttataggtgatatcagtgtggagtcttttgaaagggctggtttctgtttagcccttagggaagaaaatctaattgtagttagtgatgaagggagcgttaacaatgaggtgcatcagaccccctatcccatcatggccaagcattctgttttcaaggtgactctgcattcccttggccaggaggtggtccattcagccagttgggtgggggtgggggggcacttagaattttattcatatttctagataggattggccacatttgtgggaaaggcataaacaccatccagactcttcatttctttcttttttaaaaacaattattattatactttaagttctagggtacatgtgccaacgtgcaggtttgttacatatgtatacatgtgccatgttggtgtgctgcacccattaactcatcatttacattaggtatatctcctaatgctatccctccccccatccccgaccccatgacaggccccagtgtgtgatgttccccaccctgtgtccaagtgttcccattgttcaatacccacctatgagtgagaacatgtggtgtctggttttctgtccttgcaacagtttgctcagaatgatggtttccagcttaatctatgtccctataaaggacatgaactcatccttttttatggctgcatagtattccatggtgtatatgtgccacattttcttaatctagtctatcattgatggacatttgggttgattccaagtctctgctattgtgaatagtgccacaataaacatacgtgtgcatgtgtctttacagcagcatgatttataatcctttgggtatatacccagtaatgggatggctgggtcaaatggtatttctagttctagatccttgaggaatcaccacactgtcttccacaatggttgaactagtttacagtcccaccaacagtgtaaaagtgttcctatttctctacatcctctccagcaactgtcgtttcctgactttttaatgattgccattctaactggtgtgagatggtatctcattgtggttttgatttgcatttctctgatggccagtgatgatgagcctacctccctttattttttgagttggagtcttgctttggcacccagggtggaatgcagtggtgcaatcctggctcactgcaatgtccgcctcccaggttcgagtgattctcctgcttcagcctcctgagtggctgggattacaggcacacgccaccacacctggctaatttttgtatttttagtagagacagggtttcaccgtgttgcccagctggtctcaaactcctggcctcaggtgatctgcctgccttggcctcccaaatggctgggattacaggcgtgagccactgcacctggcccagacccttcatctctactcccctagaaaacaaaaactataagctgccatagggaagtggggagggattactgagaaagttctacctctgagacccaaggacacaggaagcatgaagtaacaagtaactgcagttttcccattaggaggggcaagagtgtggggagagcccctcgaggtgtgagtgcacagagaagaccagaaactgagggtgaggaagaaatattaagaacgacccttgggaggtaattccagggttttaggaggctgaggcagggagattgcttgaggccaggagttcaagatcagcctgggcaacatggcaaggcccagtcctgacaaaaaaaatttaaaaattagccaggtgtggtgatgcacagctgtagtctcagctacttgagaggctaaagtgggaggatcaattgcttgaacccaggagttgaaggctgcagtgagttatgattgcaaccactgcactccagcctgggtgacagagcaagacgttgtctcaaagaaagaaggaagaaagaaaaaaagaaggaaggaaggaaggaagtgttagatatgagttctaaatttattttcaaagaatcaatatgtcagtatgttcaattctttaccttctacttttaaacttaacttccttataaagcaaccttttttgattacctgctccaccctgactcatttcaatcacctgctccaccctgactcattctgattacctgctctgtcataaccatttttcctgccaaagcactcaccccgttattagccaatcagaattagtttagcctgtgcggtctaactctaccaataggggaacaacacagcagcaggggccatgtgggtcacggataagaaccccttcccctcccttgtccaagtgtgcgctcaccattgctctatctgtaagggcgcacccttctatggaagtaccttgccttgctgagaattaaaagaaaattttatatttgagtgcaattggttttgcggcactgaaactttacatataacaggaggaaggaaagaagggatggagggagggagggagaaagaaagacactgaagcaactcaacccccatctgaagcacaaggtaattctagaggaatttgaacctagtgttacactgacggaaaccatggcaataacaaaagccaaacccagattgactcctgactggattgcctcaacttcccattggttgctttccacaaccaatcagacagatttcgggccaccacttggtttacacgagttgaccaccaagtggccaatgggaaacctgtagggagtatttggacccaagaagattctgtatccgggcccttgagcccctatgctcgagcccgctcctgcactgtggagtgtactttcattttcaataaatcccttcattccttccttgctttgtgtgttttgtccaattccttgttcaaggcaccaagaacctggacaccctccaccgatgacactgagaggtgttgcaggaactcccaaatttgtgttgattaatttttgtatttttagtagagatgggatttcgcgatgttgtccaggttggtctccaacttctgacctcaagtgatccacctgcctcagcctcccaaagtaagaccgatgcctcaatgctgtgcctgcaattgcctgttcctgctgtttcagggtagttttgtttgtgtccggttcctgctgtcctccctgccccacacaggaggcctctgtgcaggacacacagccgttcctcgagagccactctgcacctgctgtctgcactagctacagaagggtccagatgagtgtctgcacaggtaggtcttgccgctgaagactaagccttgcaaagcaaaccaggagaaatggattttggtatgttagacaggcaggcagtcttcgtcctagttttgttttgttttttgcttagtaactgctattgcaaccataatattttcatccttctttccttctgaaattgtgcctcaaagagttaaagaaatcagtaactctgggcacagtggctcatgtctgtaatcccagcactttgggaggctgaggcaggaggactgcttgagcccaggagtttaagaccagcctggacaacacagtgagaacccgtctctacataaaataaaaattagctgggcatggtagcgcatgcctgtcatcccagttactcaggaggttggggcaaaaggattgcttgagcccaggagttcaaggctgcagttagtcacgattgcgcaccactgcactccaaccagggtgacagagggagaccctgtctcacaacaacaacaacaacaacaacaacaacaacaacaacaaaaccagtaagtaacagaaattcttgagtttgcaggatagcagataaggaaagaaacaacttgctgaaatgctgaaactcctttcattcgtaagataataaaactggctgaaatcagttggaacgaatgtggccaactagagtctgtgcagaaccagcttgctgacatcacagcctgaatttccatcacgtttcagataactccctctgaatttgcacacgcgaaccataagttagcatgagaagataatcatgaatcctcaaggattctgcccatctccctcttccttccaccaatcacctgctaatccaaccccaaaacttgactaataaaatgactgccttaaagccaggagggagacagatttgagctggatgcatgtctccctgggagtcaacttttcttttttcctttttgttgagagagagtctcactctgtgcccaggctggagtgcagtgaagcgatctctgctcactgcaacctaggttcaggcggttctcctgcctcagcctcctgagtagctggaattgcaggtatccaccaccacacccagctaatttttgtatttttagtgcagacagggtttcatcatgttggccaggttggtctcaaactccagatctcacctggctgacccttttaaactttacctcaaatatatagtggtggatcttttcgatttctgtataaatggattcacactctaaatatcctactatgacttgttttctttctttaacaatatgaataattggccgggcgcgatggctcatacgtgtaatcctagatggttgggaggccaaggcgggcagatcacctgaggtcaggagttccagaccagcctgggcaacatggtgaaaccctgtctctactaaaaatgcaaaaattagccaggcgtggtggtgggcgcctgtaatcccagctgctcgggagattgaggcaggagaatcacttgaacctggggtgtggaggttgcagtgagccaagatcgcaccattgcactctagcctgggcgacagagtgagactccatcttaaaaaaaaaaaaaaaatatatatatatatatatatatatatatatatatatatatatacgtgtatatatatatatatatatacacgtatatatatatacacacatatatatatacgtatatatatacacacacatatatatatatatatatatatatatatatatacataaaattattttgtcctggaggttatattttgttttactgtgacattagtaaagatacagctagtacagaagtcaatgatttcatgaatattattaaatcaaatctttacattaaaaatatgagttggggccaggcgcggtggctcacacctgtaatcccatcactttgggaggctgaggcagatggatcacctgaggtcaggagttcaagaccagcctggccaacatggtgataccctgtctctacaaaaatacaaaaattagccaagcatgatggcaggtgcctgtaatcccagctactcaggaggctgaggcaggagaatcacttgaacctgggaggcagaggttgcagtgagccaagattgtgccattttatatatatatatatatatatgagttggagctgggtgcagtggctcacacttgtaatcccagcactttgggaggccaaggcaggtgggtcacttgaggtcaggagttggagaccagcctggtcaacatggtgaaatcctgactctactaaaaatacaaaaattagccaggtgtggtggcgcatgcctgtaaccccagctactcaggatgctgaggcataagaattgcttgaacccgggaggtggaggttgcagtgagccaagattgtgccactgcaccccagcctgggtgacagagtgagactctgcctcagaaaaataatctacatatatatgtatgtgtgtatgtgtgtgtgtgtgtatatatatatatatatataaaacaagcacagaagtcaatgatttcatgaatattattaagttaaatctttacattaaaaatataagttgagttttgcacacatcgccactgcctccaggggccccatactatcagctatggtcaaccccaccaagttcttcaatgagccctggggccgcatctccatccagctgtttgcagacaagtttccaaagacagcagaaaatgtttgtgctctgagcattggagagaaaggatttggttataagggttcctgctttcacagaattattccggggtttatgtgtcacggtggtgacttcacacaccataatggcagtggtggcaagtacatctatggggagaaatttgatgatgagaacttcatcctgaagcagacaggttctggcatcttgtccaaggaaaatgctggacccaacacaaacggttcccagtttttcatctgcagtgccaagagtgagtggttggatggtgagcatgtgttctttggcaaggtgaaagaaggcatgaatattgtggaggccatggagggttttgggtccaggaatggcaagaccagcaagaagatcaccattgctgactgttgacaactctaataagcttgacttgtgttcgttttgttttgtttttgagacagtttcactcttgccatccagggtggagtgcaatgtcacaatctcagctcactgcaacctctgcctcccaggttcaagtgattctcctgcctcagcctcctgagtagctgggattacaggtgagcaccaccatgcctggctaatttttgtatttttagtagagacggggtttcaccgtgttggccaggctggtcttgaactcctgacctcaggttatccgcccaccttggcttcccaaagtgctgggattacaggcatgtgccactgtgcccagtcgacttgtgttttatcttaacctcaagaccattccttctctagctccggagagcactcctccaccccatttgctcacagtatcctataatctttgtgctctcactgcagttccctttgagctccaagttttccttattcccttccatgcctagctggattgtaaagtttatgattatgaaataaaaactaaataacgacaacaaaaaatatgagttgatttaaataaaaatattaagtaaatattagtataggtggcaagcggatatggcaaaaaaaatcaataaaatttgaatgtgaatggctacaattcaggaaatatggttttaataaaaacagatacaagctgtggcacgtgcttgtagtcccagctgacgcgcaggagggaggagtgcttgagcccggaagttcagggccagcctgggcaacatagtgagacctcgtctcaacaacaaaaatgaaaaaaatcaacaacaacagaaacacagatacatctaaaattgctctggatctttggaacaggtctgccctgaagtggtgttttatgggcctgggcactctggcacaagccctttctgggcacaaggcgaagttgatgagactcatgcttactgccagcttgctccaggccactttcagccaccagcaccatggccttctgcctccttagtctctgtaccttccctgggatttcccccaggcttgactcttctcccaactcctctgtgcatggcctgaacttgcccttgcaacctggcatggatcaagctggcttcctagtttctgccccccagctccattcacccttgggtactggcctcgcttcatcacctctttctgttatctacaccctttgccacatcactttgcagtgccctgtcaatgtgactctgggctggccatgagacctgtgttgaccaacagaaccaggctgaagtgacagtgcaccagttccagaggccctgagtgtctctataccatcttgtgcatttctgccatctctaagataaggacgaaatcagcaggtcctaggatgagggtaaaatatgtggagcagagttgcctcagccaagcctccaacctccagcagcactccagccctcccacaaactcatgaaaaataagacattattgttttttttcagccattgagctttggagtgtccatgtatcggttagctattgctgcgtatttgttgcacagcaatagctaactgatacatggacacaaagcagcagcccctggcccccacccctgttcagtgactgctgtactcacacacagagtagaaaatgcttgcacaagtgggatcaagcattttcccactttcataaccatgccccatggcgttgccactgatattgccctgcctagcactggaaagaggaggtagtgagggcaaatggaacctcttttgctcagtccagggagcaataggcagctgtcacccacaaacgacatggctcccacaatctacttcccagatcatagtcctgcctagctgggactggaggtaggatacaagttagaggtgtattccagccccagggtgctgggtgaggcctggggatgtgtccctgcccacaagatagaactggaatcttcacgtccaccagattctgggcctctctcctatgtcacagatgggaattctttccacattattcccagtgggtcttctcactcttttccaggctccttggaggtcactgccctgatgacaacatggtcttcccttcaaggaagccacgtttctaagagggctctggcatatgcattggtgagttgaagcttgacagtgttatagcttctctgctgttagtgtgaggtttgaggattttactttaaccacatggattagtcagagaaacagaatgaacaagatacagatggcgctgtagacatagctatagacctggaagaggggctttataatggagattggcctgagtgattaggagcctaagaagtcccacagtatgtcatctgcaggttgaagagccacggaagctgatggtatcattcagtttgagcctgaagttctgagaaccaggagcttcaacgtcccagggcaggagaaggtggatgtcccaggtccagaagagagtgaatttgcttttcctctgtctttttgttctatttgggccctcagtggattgaatgttgcccacctacattggtgagggcagatgttttttactcggtctactgattcgagtaccaatctctttgaaaacaccctcccagatgcacccagaaataatgttgcacctgctatctgggtatcccttaacccagtcaagctgacagctaaaagtaaccatcacaccacactttcacaaacacctgggtgcttgcggactcaccttttacaatggttttaccagcctcctccacaagcacaggcaaagtcagtttcaaggacaggagccccccattgttgctcggtgtactggcgatctaaacaaacacgtgcattatagggggtttctgtcattttttagccacctcgctttcatccctggtcctcatgaccccttgatttctttctgaggaattccctccctcccactgtgagaacagaggggccaggccctccgtctgtctcccagctctaggagagccaggggttgagccccaggccagagctcagccaatcagaggctgtcctgtgagcaagtgataccgggactgatgggatggctggagtgtgtgttgcacagatgcaacagcagcacactgaccagaccatgcccctgtgagagccggggtggggctccactgctccctagggctcccaggagctctgcctgccctcagcttcctgtccaggctctctgaaccccctcttattattttgtttaatttttaattttttttagatgaagtctccctttgttgcccaagctggagtgcaacagtgtgatctcggttcactgcaacctccgcctcctggattcaagtggttctcctgcctcagcctcccaggtagctgggatcacaggcatgcaccaccacgcccggctaatttttgtatttttggtagagacggggtttcaccatgttggccaggctggtctcgaactactgaccttaggtgatccccctgccttggcctcccaaagtgctgggattacaggcgtgagccaccacaccttgctgcaccctctcttgttgatccttcttgcttggttaggcagagacagcctccaattcttgcagctacaaggcccgcacatgaaggacaaaatgttttggttaataatgtcttcatgtgtgtaagtcctgtttttgttttccagttgaattgagagttccttttgggcaggaactcttttttccctttgtcctgggtccggtacttggcatgcagtagattctagggcagagctggaggcagggggaggctgcctagagccagagggcttgtgtgtgaggtccgcccctgcactcactcactgggggaccttggctgagtcccgcggcattttcagtctagacattgcatcaattaaacaggtgtgatgcttataatgatcaccctccttcttggcctcagggcctctgtgaggttttaatgaatgaaggctgaagaaactccacagagatggtgactttcccccagcacagctcttgccctcaaggaagagacactcgaccaaacaggcaactggaaacaggatggcttcgtgggcgtgtgtgacttacacagggctgtgcactcagaagaatcccgtgactgacttaggctctgcagctgccatcttgaaattcttaataacttttgaatggtgttgggggtggggttggaggggatggtccacactttcattttgcactgggcactacaaattatgtgaccggctctgattaaaatgctacaagaactaacatgaaactggacacagaaaccagaccccagagcacataccgtatgagtccattggtatgaagtttaaaaacagatggcactagtccaaaggattggaagttggaatagtggttaccaggactggggggaggaagggatggtggatggtgaacaaaaggaccttggagggctcctggggttctaggaatcaatcttccttctttccttccttccttccttcctctttctctctttctttctgtttttatttcaataggtttttaaggaacaggtggtgttggttacatgaataagttctttagcagtgatttctgatattttggtgcacccattacccgaataaaaatcttctctctttcttcctctctccttccttccttccttccttccttccttccttccttccttccttccttcctaccttctttccttcaacagaatcttattctgttgcccaggctggagtgcagtggtacaattatagctttttgcagcctcaacctcctgggctcaagtgatcttcctgccccagcctcctgagtagccaggactacaggaatgtgccaacatgcctggctaattttaaaaaattttttatagagaagaggtctcactatgttgcccagactagacttgaactccttccctcaagtgatctttctgcatcagtcttccaaagtgctgggattgcaggcatgagccacctcacccagccttagaaatgttctgtttcttgacctgagagctggatatacaggattgctcactttgtgaaaattcgctaaggatttgtgcacttttctgcatatgtgttaaactgcagtacaaggttaaaagaaaatgtgtgaaacgacctatacattgcaaaggaaaggccagggtgttgagcttgacccaccttggggatgctcagagaaggcttccctggagaggggtctgggtcaggtcctgaaggaggagcaagggatgggggttgggaagttttgtggctccctaccaagggatgacgtgcctgtctggcaggagctaggctcatgcatggctcgggagagcacctgcttgtactgagtctggctctgcctgggagcttgaggatgcgaatgaattggagacacaaagaccagcttgtgggggccgtggactccactctctgggctcgagactccagctgcagtgtggaggacagcctggggtgggagatgggaggcagggagaccctgcagaggctactggacttcccaggtgagcagtgatggtgtcttgggctgggggagtgtagacaggagaatggattctggagactttattccagtggtagctgtggtggtcttcacataggatcacaaattccttggcatttgtcccatcaagagatgaagtctaatttcatccctcttttttttttttttttttctgaaatggagtcttgctgtcttgctcaggctggagtgcagtggtgcaatctcggctcactgcaacctctgcctcccaggttcaagtgattcttctccctcagcctcctgagtagctgggattacaggcacatgccaccacacccggctaatcttttattttagtagacacggggtttcaccatattggccaggctggttttgaactcctgacctcaggtgatccacctgtctcggcctcccaaagtactgggattacaagcatgagccactgcacccggcttttttttttttttttttttttttttgagacagagtctcactctgtcgcccaggctagagtgctggagtgcaatggcgtgatctcagctcactgcaacctccacctcctgggttcaaccaattctcatgcctcagcctccccagtagctgggattacagacgcctgccatcatgcccagctaatttttgtatttttagtagagatggggttttgttatgttggtcaggctggtctcaaactcctgacctcaagtgatctgcccacctcggcctcccaaaatgctgggattaggcgtgacctacggtgcccggcctaattccatccctcttgaatgtgagctggccttagtgacttgcttctgatgagtagaatgtggctgaagggatactacacgacactccaggctagattagaaaaggccatgccacttctgtctggctcccttggaactcaacaggcgtgctgcaaagaagcccaggctataaggcaaggccacatacaggtgatctggttgactgccctactgagatcccaggtgacagttaatctcaagtccagatatgtgcaagcagaagttttcaagatgaccgcagctgcatgagcctctgaatgagagctgcccggctgcctggctgggagcggtgatttttgccactgagtttggctggtttgctagcagcaagaaaacagcagcctaggctgtttcgaggaatcactagagaagcttaaaaacttcccaccgcccaggtcacgcccaagcattatttttcggagctcccaacatgcatccaaggctgagaaggagtgcaggaggccaaccctgaggcccctgagcctcagtggagacagcagtctgggccgatgtcacgaaacgcccctttcctttccaccacctcccttcactcagctctcttttgtctccgcccacttgtttccatcttcagttcctggtagatgaaagggatccatttaagtggcagggactttgaaatcagtgtgtcagtccctgatgcttgtttattttcaaagcaacataggagaatggatgtggaggggaagcggggaggctctcaagggcagtagtgggaataggattgccagataaaatacaagaggctgtattaaatttgaatttcagataaaccatgaattttcttttcggtagaagggtgctccaaatattacatggacatacttatactaaaagattacttgttgtttatctgaaattcaaatttaatcgaatgacctatatttgtatttgctaaacctggcaactctaagtgtgaagccaggtcaaggtgacacccagaactcatttagggacatttgcagactcccaagttccttcaccagcaaagtaggaaacctctcaggaatcctcaggctcttcctcttatttagagaaagtgaggctccaagacaggaagtaacacattcaaaacaggcaattcttggtttgcacattatcatggtcactaaacacatgtatactgaaaccgtgttcttgctttgctgctatgaatatttgcatagaggtttttgtattgacacaaattttcaactcagttgggtaatgcctgggattgtgattgctgggttgtataagtctatgtttgactttgtaagaaactgccaaactgtcttccagaatggctgtaccattttatcttcccaccaggaatgaaagagagtttcaatttctctacatccttgccaacatttattttccattaattaaaaaaaaatttaaggctgggtgcggtgactcatgcctgtaatcccagcactttgggagattgaggtgggcagattacttgaggtcaggagttggagaccagcctggccaacatggtgaaaccccatctctactaaaaatacaaaaattagcggggtgtggtggcaggtgcctgtaatcccagctacttgggaggctgaggcaggagaatggcttgaacccaggaggtggaggttgcagtgagctgagatagtgccactgcactccatcctgggccacagagtgagactccatctcaaaaaattaaagaaataaaataaaaaaataaaaaataatagctatcctagcagctgtgagatggtctgtcattgtgattcagatttgcatttccctaataattagtgatattgagcatcttttcatgtgcctattggccatttgtatatcttctttggagaaatagctatgcaagttctttgctcattttggggttttccatgaaactcctacaactcaatgacaacaaaaaaacagtgcaatatatatatgcttgatattaaacccttatatataagatacaagatttgcaagtgtttcttctcgttctgtgtgttatcttttcactctcttgacagtgtctctttttttttttttttttgagactgagttttgctctgtctcccagggtggagtgcagtggtgtgatctcagctcactgcaacctctgcctccagggttcaagtgactatcctgcctcagcctcccaagtagctggtactacaggtgccacccaacaccaggctaattttttgtatttttagtagagatggggtttcaccatgttggccaggctggtcttgaactcctgacctcaagtgatctgcccacctcatcctcccaaagtgctgggattacacgcatgaaccaatgagcccggttgatagtgtcctttgatgcataaaagtttttaattttgatgacatccaatttacagtttttttcttttgctacctgtgcttttggtggcctatttgagaaaccattgccaaatctaagatcatgattgcccctatggtttcttctgtgtttgactttaggtcttacgttcaggtctttgatcaatcttgagttaatttttattcatagtgtaaggcaagggttcaacttcattcttttgcatgtggatatccagcttccttggcaccatttgtgttttttttttccttttccatatatattcttcttatgtaaggcaccatttattaaagagactgtccttttcttattgaatggtcttgaaattctcgtcaaaaatcagtacgcgagagggtttattttctgggctctttattctagcctattggactatatgactatctgagaccacaatgttttttgttttttttgttttttgagacaaagtcttgctctgtcatccaggctggagtgcagtggtgcgatctcggctcactgcaacctctgcctcctgcattcaagtgattctcgtgcctcagcctcccaagtagtagacaggaatactactaactgccaccatgcctgtcttttttttttttttttctgtagttttagtacagacagggtttcaccatgttggccaggctggcctcgaattcctgacctcaagtgatctacctgccttggcttcccaatgtgttgggattacaggcatgagccatctgcctggcttcatagtattttgattactgtagctttgtagtaagttttgaaatcaggaagtatgagacctccaactttgttcttctttttcggttattttggttatttggggtctcttgaaattccatacaaattttaggaccagtttgcctacttctgcaaaaaaaatgccattgggattggataggaattgcactgaatctgtggatggctttggagaacattgttgtattagtctgcttgaactgctataacaaaataccatgacaggtggcttaaacaatagaaatttatattcctcacagctctggaaactaaggatccatgatgaaggtgttggaaaagccagtttctcatgaagtttctcttcctggcttgtccatgaccaccttcttactatgtccttggatggtctttccttgcatgcagagcaagagaaagctctctggtatctctgccaggatagggacactaatcctattgaaccaaggccccaccttcatttaacattaattacttccataaaggccctatcttcagaaacagtcccattggtggttagggcactgacatatgcattttggaagaacactaacattcagcccataacaattgtcatcttaacaatattgtcttccaatccatgaaggcaagatgttcttctgtatatttctgtttaatttctttcagcagtgttttgtagttttcgatgtacaaacttgctcctccttggttaatttttttactaaatattttattcttgatgttactgtacatggaattgttttctcaattttcttttcagattgttgtttcctactacttagaaatatatatcctactatatagaaactgattcttgtgtgttgattttgtatcctgcagctttgctgaatttattagctctaacagttgtgtgtgtgtgtgtgtgtgtgtgtgtgtgtgtgtgttgggtgggtattcattaggattttctacatataagattatatcatctaccaagagagataatattacttcttcttttctaacttggctgcctttcatttctttatcttgcctagttgctgtgactagaactcttagtactacgctaaatagtagtggtaaaagtgggcatccttgtcttgttcccaatttagaggaaaaaaatcttcagtctctcattattatgttagttatgggcttttcttatatggtcctaataacgttgaagaggttcgtttctattcctactttactaagtgttttatcttgatgttggatattgtcaaatgctttttcggcatcatttgagatgatgattatgatgatgatgatgattattattattatttgagacacagtcttggtctgtcacccaggctggagtgcagtggtgtgatctcagcttactgcaacctccgcctcccgggctcaagtgactctcctgcctcagcctcccaagtaactgggattacaggtgtctgccaccgcacccggctaatttttgtatttttagtagagatggggtttcaccataatggccaggcttgtcttgaactcctgacctcaggtgattcacctgcctcggcctcccaaagtgctgggattacaggcgtgagccaccgtgccaggcccatttgagattattatgtggttttccccccttcattcctttttttttttttttagactgagtttccctcttgttgcccgggctggagtgcagtggcacgatcttggttcactgcaacctctgcctcccgggttcaagcaattctcctgcctcagcctcctgagtagctgggattgcaggtgcccatcaccacatccagctaattttttgtatttttagtagagacagaatttcaccatgttggccaggctggtctcgaactcctgacctcaggtgatccacccgcctcagcctcccaaagtgctgggattacaggtgtgagccaccacacccggactacatcgatttatttttatatggtgaatcaccattgtgtctctggaataaattccacttgttcatggtatataatcttacaaatacgctgccaaattcgttagtattttgttgagaatttttgtgtttatgttcataaggagcagtggtctgcagttttcttttctctcagtgtctttgtcttgctggcctcatagaatgtgttctttcctcttcaatctttagaagagtttgagaaggatttgtgttacttctttaaatgtttagtagaattcatcttgaaacaatctgttcctgcgcttttttgttggaaactttttgattactgattcaatatccttacttgttatagatccaatcagattttctatttcttcttgagttagttttggtagtttgtgtttttctaaaaatttgtacatttcatctaaggttttctgattttttggagtacaattgtttatagtattatccaatttatttctgcaaaacagtactgtctcactttcatttctgattttagtaatttgactcttttctctttttttcttagtcaattttgttgatctttaaaaacatcaacttttcactgggtgtggtggctcactcctgtaatcctagcacttttggaggctgaggtgggtggattgcctgagcccaggagttcaagatcagcttgggcaacacggtgaaaccctatctctactaaaatacaaaaaaattagccaggcatgatggcgtgtacctgtaatcccagctactcaggaggccgaggcaggagcattgctagaacccgggaggcggaggttgcagtgagccgagactgtgctactgcactccagcctgggcaacagagtgagactcgatctctttaaaaaaaaaaaatcaacttttattttcattgatttcctctatcatttttctgttttctgttttgtttttctccactctaatctttgttattccttctttctttttcttttcttccctttttttttttttgagatgaagtcttgctctgtcacccaggctggagtgcagtggtgccatctcggctcagtgcaacctctgcctcccaggttccagtgattctcctgcctcagcctcccaagtagctgggattacaggtgcctgccaccacgcccggctaatttttgtattattagaagagacggggtttcaccatgttggccaggctggtcttgaacttctgaccttaggtgatccacctgccttggcctcacaaattgctaggattacaggcatcagccaccatgcctggccttattccatctttctgctagctttggttttagtttactcttctttttctagttacctaagccacatagttaggttattgatatgttagtttgctagggccatgataacactttatcacgaagtgagtagcttaaacaatagaaatttattttctcacaattctggaggctggaagtccaagatcaaggtgtcagcagggttgatattttctcaggcctcaccccttggcttgcagatgctgccttctcactacaatcccacgtggtttttcttatgtgtacacacatgctactgttcagatctcttcttctctgttatgacatgaggtcttgctctgtagcccaggctgtagtgcagtggtgagctcatagctcactgcagcttcgacctcttgggctcaagcaatcctcctgccttagcctcccaagtcgctgtgactacaggcatgtgccaccaaacctggcttatttttttttaattttatttatttatttatttatttttagagaccaggtctcactatgttgctcaggatagtcttgaatcctgggctcaagtgatccacctgctttggcttcccagggattggtagcataagtgctgggattacaggcataagccaacatgcccatattattttcttactttccatcctttcgaatcttttgatccaaagtaagtctcttgcagacagcatataaattaataatttttagaaatccattctatcaatctctgccctttaattagacagtttagtccatttacatttaaagtaattaccaataaaggatttaattctgccatttatttaatagctatttgcttttctgtacattttttaaattttgttcctcaattcctccactactacatttttttggtatttaatagattttagtgtatcattttgattccttttttctttccctgtctgtatattttttagttattttcttagcggttgccttggggatcacaattagcatcttaaatttataacaccctaatttgaataatactaacttagttttaagagtatacaaatactttgctcctatacatctctttccctccctctttatattattattgtcccagatcatatctttatacattctgtgcccattaacatagatttataattattgtttcatgcatttgccctttaaatgataggtgaaaaacaaagtattatgaacaaaacctacaataatactggcttttatatttactgatgtatgtagttactatttttatcagtgttctttttttttctcatcatggctttgaattactatcaagtttcctttcatttcagcctgatggattcattttagcagctcttgtagagcagggctactagcaatgagctttctctgcgtttatttatctgaaaatgtcttaatttctcctttattcctgaaggatagtttgtctggtaggaaattcttggttgacagtcttttttttttttttccccaggactttaactgtgttattccactgcctctgggcctctggttccttttcttttcttttcttttcttttctcttttctttttttttgagatggagtctcacactgtcatccaggctggagtgaaatggtgccgtcttggctcactgcaacctctgccttccaggttcaagcaattctcctgcctcagtctcccaagtagctgggactacaggcacccgccaccacgcctggctagttttttgtatttttagtagagacagggtttcactatgttgaccaggctggtctagaatgcctgacctcatgatccacctgccttggcctcccaaagtgctgggattataggcgtgagccactgtgcccggcacttaaaaaaaatttttttttgagatggagttttgcttttttagagttttgctcttgtgcccaggctggagtgcagtggtgcaatcttggctcactgaaacctccacttcccaggttcaagcaattctccagcctcagcctcccaagtagataggattacaggtgcccaccaccgcatctggctaatttttgtatttttagtagaatggggtttcgccatattggtcaggctggtctcgaactcctgacctcaggcgatctgcccacctcggcctcccaaagtgctggaattacaggcctgagccactgcacccagcccctctatggtttctgatgaaagcttagctattaatgttactgaggactccttgtaccttacaagttgttcctctcttgctgctttcaagattctctttttgtttctgatttttgacaatctggctgtgagtttcagtatgaatctctgagtttctcgcgcttgtaatttgttaagcttcttggacgtgtatgttcatatccttcatcaaatttgggaagttttcagccattatttcttcaaatttctttttctgtcccttcctgttcctcttctccttcaggaacttctactatgcatatgttgatatatgcttgatggcatcacatggatctatcaggctctgttcatttttccttttcttttttttgagatagagtctcactctattgcccaggctggagtgcagtggcatgatcttggctcactgcaacctcctccttcttgattcaagtgattctctggcctcagcctccccagcagctagggttacaggtgcgcgtcacaatgcctggctaatttttgtattttagtagagatggggtttcaccatgttggccaggctgatctcaaactcctgaattcaagtgatccaccctcctcggcctcccaaagtgctgggattacaggcatgagccaccatggccagcctatttttcgttatttatttttctctctttacaactggacaatttcaattgccttatcttcaagttcactggttctttcttcttcctgattcttcagatcagctttttgatctctctagtgaatttctaagttcaagctattgtacttttcggctccaggatttctattttgttcctttttataagattaaactatctcttcattggccttccctatttgttcatatattattttggtttcctttagctcattgggtgtaagacagttgatttaatgtctttgactaatgtttccaatgtaaaggcttccttggggatggcttctattgaattctttttttccccctgtgaataggctatactttcctttttctttgtatgctttgtaatattttgttgagcacttggcattttgggtattattgtagtaactctgaaaatcagattctcctcctcttcagggattgctgatttttgcttgttgagggttgcagccatctgtttgtttagagacttttccaaactatgtttgcaaagtgtgtagtccttattgcatgtggttactgatgtttttgtttcataatctttacaggcaaccagtgacctggaaatgatatctgtaaatttctggctacaaaaaggtgttctttactttcaaatctcctgatggatgctgccataggaagcacaagagggctgaaaccaatacaggagtctgtgctaatccctcaggactcaaaaatgccccaatttttggaggacaagggtcatcttgcccaccttgcaaccagccagccattccaggaaagctattcctgcagcctcatggtagggtgagggctgagaaatggggcatggcagctgttttgcatccaccctgttgctgttctcttaccaacaaccagcagcctcttttttcatcaagaactcccctggctgtttattcatgtctcatgaggtttgcctgtctaattttttgtatctttagtagagatggggtttcaccatattggccaggctggtctcgaaatcctgacctcaggagatccatctgctttgggctcccaaagttttgggattacagatgtgaattattgtgcccagccaaggctgggtaatttgtaaagaaaggaggtttatttggctcgcagttctgtgggccatacaagcatgtggcaccaacacctgctcggtttctggtgaggcctcaggaagcttccaatcatggtggaaggcaaatggggagctgcacgtcacatggcaagtggaagtaagagctagggagcaagagaggaaggaggaggtgccaggctcttttaaacaaccagctttcatgtgaactcattactgcagaagagcagcaaaccattcatgagggatccgcccccaagacccaaacacctcccactaggccccacttccaacattagggatcacgtttcaacatgagattttgagggaacaatatccaaaccatgttagtggccctctattgactccaacatctatgaacagggctggtgcttgccttggtcaactcttgtctcccattcccagtggggggcctggcacatgaagaagggattaaccaataataagtaataaagtaataaggtaataaaataatatttactttttttttttgagacagagtctcactctgtcacccaggctggagtgcagtggcaccatctcggctcactgcaagctctgcctcccgggttcatgccattctcctgcctcagcctcctgagtagctgggactacaggtgactgccaccacacctggctaattttttgtgtttttagtagagatggggtttcaccatgttagccaggatgatctcgatctcctgacctcaggatctgcccacctcagcctcccaaagtgctgggattacagacatgagccactgtgcctggcctaccatttttttttttttctgagaggagtttcactcttgttgcccaggctggggtgcaatggcatgatctcggctcactgcaacctccacttccagggttcaagtgattctcctgcctcagcctccccagtagctgggattacaggcatgcaccaccacacctggctaattttgtatttttagtagaggtggggtttatccatgttggtcaggctggtcttgaactcccgacctgaggtgatttgcctgccttggcctcccaaagtgctgggattacaggcgtgagccactgcgccttgccaatttttttttttttttagacgaagtgtcattctgttgcccaggcaggagtgcagtggcatgatctctgctcactgcaacctctgcctcccaggttcaagcgattctcctacctcagcctcccgagtagctgggattacaggtgtgtgccaccacggcggctaatttttgtatttttagtagagatggggtttcatcatgttggccaggctggtctcaaactcctgacctcaaatgatccgcctgcctccacctcccaaagtgctgggattacaggcatgagccactgcgcccggccaaagctgatcatttgaaagtgtgataagtgctacaaagaaaatttaaaaagtgaggtgagggcagatgcctagaggagaggggaggggcttttgtggacaggagatcaagaaagccctgttattatttgaactgaggcctgagtaatggcaaggaggcaaccatggaaagatatgggagaaatattgcaggcagagagatcagcaggtgcaaaggccctgaggcaggaactagtctggagtatctgaagaagagagaaattgttgtggttggcttgagtggtagggggcttggttggaggtggggaaggtgggtccgacaatgctgaattctagtaggatgtctggatttgattctggttgctgtgggaagccatggagggccctagaagggagactgacatgacctgatcccctttgaaaagctcacccagactgctgagtggataatagtttagaggtgtgcgaattggatgtctttggctgctcatgatagaaaattgtcctggtcatttagaaaatttactggccttttaaacgggaagttcagaagtgatgcagactccagagctggttgattcagccctggatcaagttctgtgatgctgtcaaggattgggttctgttctcagctctgctgaccacagatcgcacttcattctgagtactggagtgtctaggtggtctggggggctgtctgatacacatggggctacctgctttgcacttcctggccaaggggatagactgattccttatgggagcacttttgaagaatgaggaagaaccttctcaggagaggcgtggtggctcttgcctgtaatcccagcactttaggaggccaaggcgggtggatcacttgaggccaggagtttgagaccagcctggccaacatggtgaaaccctgtttctactaaaaatacaaaaattagccaggtgtggtggcacgcgcctgtagtcccagctactcaggaggctgaggcaggagaatcgcttgaacccaagaggcagagggtgcagtgagccaagatggcaccattgcactccagcctgggcaacagaggaaaaaaaaaagaaccttcccagaagcctccaggaagtctctgtttggacgacatcgcacacccattcttgaaccaactatttagaagggagatgcatcaccccctttgcctggagctagggggtgggtcagcttcctacaggcacaggactatgtggtcgcgggttaagcccctaaacgaggggaagtggggtgggcagcagccgatctccattacaagggacaagagtaggggcagcaaggccagatcaatggttgctgaggtggctggggatggagagaggatggtggtggtagaagagatggtaacaatggtcaggtcctggctgttccagaggtgatgatggttggatatgcagtgaggaaaagacaggaatgaacatttatcttttcccaagttgtccttgctttcttcctttgaagccataaaaaggaaaaaaagggtggatctggacttgggagctgggcaggagtgagggaagagaagcagagcaagcaggcacaccaggctgtgactctgcaggcatctctctgcctagacttgtctgtatgatgtggaacgaacacgacccatctttactgctagcgactgcagcagataaggcaaggccactttcacgcagttaggttaataggaggctgtacaaagggctgtaggaggaagtgggcacaggagttctaaaataattggaacggccaggtgtggtagctcacacctgtaatcctagcacttcagggaatccaagacaggaggttagctaagacaggaggctcgcttaatgtcaagaccagcctgggcaacatagggagaccccgcctctacaaaaaatagaaaaattaacaggatgtgttggtgcgggccagtggtcccagctactcctgaggctgaggtgggaagatcgcttgagtctaggagtttgaggctgcagtgagaaatgatggcactactgcactccagcccgggcgacagaccaagactcagtctcttaaaaaaaaaaaaaaaaaaaagaaaagtgggggcaaagttatccttggaaaatttcttagtccattcatagcagcatattaaaattagtacagtagcttaatttatataagagaaaatacaatgtgtacagtaattaatgaacatgcaaaatataattgtatatttcaactcactaaaaaggcacagaaagagttgaatttgctaaaattaaatgtgcttatgaaacagctctagtacatgaattaagctcctagatacagatgcagcgccaaacgacggggagggagatggggcactcaaggcgacacgcggctcttgttgccgagcgtttcctgggcgtggagcttctatagaatgtaagctttttttttttaaggttccaaagcctatatttagtgctttcatatacgtaatctcaaaaaaaaaaaaagaaagaaatatcggcataaaatgtaagcttccagagggatacaaacgcagcccagcgcggacaccgccagccccagccacgcggttcgcatcaagcgcactcccctgggggcggggcctgcgcgagctgggcgtgtcgggggcggggcctgcgcgcttgcttccggcgtgccgcgagaggcggggcgtgtggggaggcgcggccgccacgcgacgcctggctgggcccgcaccggagaggcgtctcggtacctggcaggcggcctgctactcggagcccgctgcggggcggcggcggcggggacatgcacgtgtgagatgcggcagcgggcggcgcggacgcgaacagcagcggcggcggcgggcgcggcctcctgggcgcggggcgcgcggtgcctgagggcgggcgcgcgggcgctgggcaactgccggccgcgccgcctgcgcaggcgctggttcaggactcacacgccgcgctgaggcccgcgggcccgtcatggaggcgcccaccgtggagacgccccccgacccctcgcccccttcggccccggcccctgccctggttccgttgcgcgccccggatgtggcgcggctgcgcgaggagcaggaaaaggtaactagcagccccgcgccgcttccgcctccgcccgccgggctgcccctgcctgtgctctgggccgccgccccgcgtggcctaggcccagctgcccgggcccccggagggaacggggataaacttttgtcacgtgcttctgttgtctttgtctgcagccctttgacttcgcagcggagtgaggggtgtgcagcccgttcgcctgcccaggaaagggggcttctgagctgaaggcgtgcggcagcgcgtgggaatttgggggcgggggcagcacgctgtcaacggaagcgttcgccttaatatttgtagcttgtaatgacctaaacattgcttaaaatgtgtactgtttgttgctctttgattgcacggaaaagttttaccgcgtttgtcatgataatgcttcctgtgcaatatttggttatttaatatttgtcacaatataatgccatttaaacattaaaaaaaaaagagagtctcactatgttgcccaggctaatctcgaacttctggcctcaagcgatcctccccctcctacccttccccacctcgcctcccaaagtgttgggattataggcctgagtcaccgcacccggctcatttttacaaattttaatttcatcgtataataaatgagttttaaactactggtgaaaagggtacaaagttttgtgtttcctagtgggactttatataaagaagtattcccaatttaagaaatagttttattgttaaatctgatttttctgtggattctgtggtctttcagattgattctgtcccctcaagtgtcttgaaattgttactttgaaaagcagtatttaatttgcttaaaatattttatgtcatgtttggaagagcatggattataaagggttaggaagttgcttcaacactataagcagtttaaaagttcttaactttttaattgaacattcctgtataagaacgactgtttacatagatacaaaaatatactcagttctactagatgggggttttgatagaacttaaaaaaccctcgtttgcttggaaaccacctgttgggatgaactgcgggaatctttctttgttctggttggtttaaattattttgtgggttggattttcatttctcagccatttttctctaataacgcaactgttaggtttggaagccatgttttcaagatgaaggtttaaaaatccagtggctagggtggtgactcaaacctgtaatcccagctgcttgggatgtcaaggtcgtggaattgcttgaagccaaggagttcgagatcagcctgggcaacacagggagacctccgtctatacaaaaaaatacaaaaaattagccgggccatggtggtgcacgcttgtagtcccacgtacttgggaggctgaggtgagaggatcacttgagctcaggcgtttgaggctgcagtgggccatggtcatgcaactgcacttcaccctgggcgacagagtgagaccctgtcattcatatatatatatatatatatatatatatatatatatatatatatatatatataaaacttaactagtttggcgtctttaaattagaagacattaatgtatttttttaaaagagaaagatagaaaaagaagaaagaaaaaacagcccctcatgaaatcttactccttttgccaaaacttggcattttttattctttcagagaatgtgacacagaccctcagaggatggtgtttctattgcctttcctctgctgcagtgggttaatttcacctccttcagtgtataatacgtgcataatgctgacttgatatgttttctgccatttggcatattaaaaagatatccttagttttattctgatgttagtgtgactgaaatgcaaaggatactttttggggtgctctgaacagctttctggtatcgtgttgagttacattggaagagagagtaactgctttttcagttacagtcttgtggcaaactgaatgactgttttctgtagacattgactgtgctaccaaattatttttctgtgttgtgttaatgttaattcggcacacaaaataaccacgtatatctgtcatgggtgtgtaaaattatccccagttcaggaaaaagcgcgtcagtatttaatctatctttatttaatagaagcatttgcttcagtggacaggagacccacaaggccacaaaataaactgattagatagctgcactgtaattatagtgtagtacaggaaaactacccagtaaatcggcagtgaaaattttttgtgaagcaatttatttaggctttaaagctggcccagttgtgggagtacagtgagttctagtaaagtagaagcgtagtgacatcctgagtgtagaaggggaaaatgtcatagtagcttcatatgtggcacttagtattcctttatgaaagatgaatcaaacatgcttttaagctcttggcctttccctacatgggttttgtgagacagagttaaactctgcagaaaatgatttgaatgactgttctcagttttccctgagagggtacctacctagttggctgtagatgcagagagagaaatgagttccttacacacagtgggtgccttaggcttagggcataatcttctctgggagccttgattgagaggggctggtaggtaatgtggcttaaatgttgctcattagttttgctctttctttttttccaaattcagctaaggagtataacaagttttacgctctctctctctttttttcttgtatgttctctggaacatggaataaaaaggacaaaaaattggcaacctgaggaagaggacagacaaggggcatgaacaagccacaacctctaagtgacaatatctgtagtcagcggttaggatcaaatattttaacattgctttcacttacagtcaatggtgaaacatttccaaaacaatttattttagttagaacttcggtttgtttctattttgatctagcaataaaacatgtaagaaacattccctgcagctttgtttataaagagaaaaactaaaagtctgacattgggggattggttaaataaatcaggagctgttacgtaggcattgaaaactaggacagtatgtatagggtggttccagttacgtttatataaatatttacacattttacataggaaaacaccattgttttaaaagtacacaattttattattttacctaaaagtttgtaaaattggatgggatttttttttttccaaaaaaagctattgataaaacttattttaattttaacgaaaattggaatgttactttaattgcaaaacactttctgagcctgaaaaatggctcttggctggtttgaatgccggttaggcaggtttatttcttggttacttcagagctgatatatataatttattcaaacaaccatcttccagttgatttccttcccccccccaaaggttttatttaatcttcatttgttataagatacagggagaggagagaaattcagatcatcctttttttgtctttaactaaatctgtttttactaacagcagtaaaatatttgttggaaaaatggaagcttaacctgtctagactgtgacctataccataaaatgtgtggtctaggactgttgtggagtgtcttgggctgttcagggaggtttccttgtactaagatcttgttaaatctgattctaagaattgcattatgttgaaatttttgtttcttggctaaggtgatgtttctgagatacctgtattttatctctagatactattagcttttattagcagaactactgagattttattgtaatattttaaaaagtggtggatccagtatcgtttttataggcttatttgcaggataatagtaagattagaaaattcattaggataatatatttataattgagtgcctcatgtagttctcacttggaattttggaatagcttatacttcctgatatagatccttggggaattaaatgcattaagagtaaatattttaaattttttataaagcagaacagctaatttaacttaatggagggttttcatatttcttgtgataaactaaactgcacatagtttaaagaactgtcagccacgtaggccatataacagctattctttccaagcctagaatccatgccatagaatttatgtaacaaatatttaatgagtatctactacatgccaggcatgttctgctgagtgtgcagtaatgaacaaaatacagcaagttctttctttcatggttacactctaggggtgaaggcatgcagttacatagccttaccttgggtgtttggtaggtaaggctaagtagaaaaacaggaaggtaagaggcgtgtagagaatgagggatgtgagtggagggatggtgtcttctgtaagccatcagagagggcttctctgttaggttccatttgagcagaaacttgaaataagtggggagtgagctgtgtggatatatggaggatattttagagaagagctttctagccagtatgagagcagtaccagatcattgtaagagttttggttttcatatttgtgagatgggaaacgattggaatgtgttttgaggctgatcttaaattatatccatttgtcatgcatatgtgaagaaatggacggatggaattacattatagggagcaactctgtgtgccacgcattgtgatagatgtttacagatccgatcttagaattttcattaatactgtttatttttcagatgaacagtttgtttctagtttttgcctggaactttctcatggcgtgtttgtgtcttcagttccacttagaatgctttttctaaggtggttataccagtttaccgcttgctagcagtggacagaagttctccctgcttcagtctttaccaccatgtgtcttttcatatttgctagccaatctagtgatgagtaatgaggttgatgaccttttcagatgtttattggctacttggatttttgtgttttgtttttgtgaaatacctgctcatctgttaactactttctattgggatgttagttatattctaattgattcatagtaatgactgcctttccaattatatattgtaagtttcttccctggtctgtggcttgacttggagcacttacagtggtgtctgtcctttgatcaacagacatttttaattttaacaattgtttccttcatggttagtgttttttgtcttatttttaagaggtctttcttactacttttctgaagatatcctcttatattgtctaatagaagctttactgctttgcttttcacattgagaatctacattctacctggaattggctttgtatatgggggagattgaggtcaggtttcatttttactgtatggatacctagttgtcccatcagcatttattggaaagagtgtcatgtctccaccgcattgtcatctttgtcataaatcaggtgactgtgtaagtagatcagtttcttgactgttctgttggcttgtctgttcttgcagcaaacctacactgtctaaatcattatgactttgtgttatcttggtacctggtacatggtggtgtagttttagttgtggttcctcaagattgcctttattttctcctttccagtccgtatgctgtttctttctttttcttgcttttgatactggccagttcaagtgctggtagtgggcatcaggggtcaacttttaaacatttaccattaagtgtggtatttactgtgagtaatttttgtatttgcttttatcagattaaggaaatttccttatattccaagtttgctatgagtttttatgagtgggtgttgaattttagaaatgctttttctaaattgatttaattatggtaatttattgaaaagagtatatttgttctgtaagttctgtaacttcaataagtaatgttgaagttacttttttttgccttcaagcatctgtttaacaaagcacatcttgcaccacccttaatccatttaaccctgagtggacacagcacatgtttcagagagcacggggctgggggtaaggttatagattaacagcatcccaaggcagaagaatttttcttagtacagaacaaaatgtagtctcctatgtctacttctttccacacagacagcaacaatccgattcctttatcttttccccacatttcccccttttctattcgacaaaaccgccatcgtcatcatggcctgttctcagtgagctgttgggtacacctgccacacggggtggcggccaggcagagggagtcctcacttcccagaaggggcggccgggcagaggcaccccccacctcccagacgggaccgcggccgggcggaggcgccccccacctcccggacggggcggctggccaggcgggggctgccccccgcctccctcccggacggggcagctggccgggcgggggctgccccccgcctcccggacggggcttctgccgggcggagacgctcctcacttcccagacggggcagctgccgggcggaggggctcctcacctcccagatggggcggctgtggggcagagggggctcctgacttcccagatggggcggctgccgggcggaggggctcctcacttttcagacggggcggccgggcagagacgctcctcatctcccagacggggtcgtggccgggcagaggcgctccccacatcccagacggggcggcggggcggaggtgctccccacatctcagacgatgggcggctgggcagagacgctcctcacttcctagacgggatggcggccgggaagaggcgctccccacttcccagactgggcagccgggcagaggggctcctcacatcccagacgatgggcggccaggcagagacactcctcacttcccagacggggtggtggctgggcagaggctgcaatctcggcactttgggaggtcaaggcaggcggctgggaggtggaggttgtagccagccgagatcacgccactgcactccagcctgggcaacattgagcactgagtgaacgagactccgtctgcaatcccggcacgtcggggggccaaggctggcagatcactcgcggttaggagctggagaccagcccggccaacacagcgaaaccctgtctccaccaaaaaaatacgaaaaccactcaggcgtggcggcgcgcgcctgcaatcccaggcactctgcaggctgaggcaggagaatcaggcagggaggttgcagtgagccgagatggcggcagtacagtccagcttcggcttggcatcagagggagaccatggagacagagggagagggagactgtggggagacgggagggggagggggagggagaggttacttattttttaagaaaggcacagttgtaagaatatgtttgcttgtatagccgaaggcacattccgttttgtaggtaggtgagttttcagaactcattacttgtaagttttattttagataaacttcttgttgttggcacttagtattgtgccagtaatgtgccataagaagagacaactttggttttagttctttggaagttgtcaataaacataaaacagtatttcaaggaggaaaaaacccatttcattgttttaggcttctctagattggaagaaaagatggtaatggtcccaaaacactggggggaaagggggaagaaggtgcgtggaatctgtgatttggccataactgctttattttgttttacctgttgttatcatttttagtttaagaaccttttagcttgtatcacttgcccttatctccagagtgatgtctcaatctttttagtctgtcatatgcaattttccccccttaaactacaactgtttatttgaaaaattataaaagtacaggaaaggtgaaagaacaatatgatgaccactgtttagagtaatcagttagcattttgtcctatttgcttttctctttatatattccttttttttcccttttccccctgcagaaccattcaaaagtgaattgcagacatcatcacatcaataatactgaagcacttatcattttacatcaaggtcattcttctacataaccatatctttttttacactcaagaaattaacattgacatgtaccatattcacattttctcagtttttctaaaaatgtcctttataactctctttcaatgcaagagccaatcagagattactatggcatttgactctcttagctccttaatcttctttcatctaaaattattccccgccaccttctgtctttatgaaattggcatttttgaagcgttagatcagttttcttgtagaacgtcccacaatttggagatgtctaatgaacataatcatgaagaaacaaacatttttggcaagaatactacgtagatagctggttggtggcacaagcctatagtcccagttactccaaaagctccgaaggctgaggcaggaggtggagtccagcctgggcaacaaagtggtaaggtcctgtctctaaaaacacacacacacatacacgcgtgattacatagatgatgatgactttccattgcatcacatcaggagacacataatgtcatttttgtcccattattagtgttgctaaccacttgtttaagatgtcaagtctctccatcataaagttacctttaaatggtatagtacttgaagacagtgtaaatatcctattcctcaaaagccttttgccatggatgatccttgcctaaatcagttatattggtgtttgctaattagtgattttctaacaatgtatttattagtttatgtttttcgagcaacaagaactctagcacccccccctttagtttcacaataaactcatttttttgttgtttcaagttgagagtgatgtgatttcttcattccttttgatgttcaaattgttctaaatttggccaatgggagccccttcaagctggctcaagcatgcattctttttttttttttttgagacagagtttcttgttgcctaggctggagtgcggtggcacgatcttggctcactgcaacctccgcctcctgggttcgagtgactctcctgcctcagcctcccaagtagctgggattacaggcctctgccaccacgcccagctacttttttgtatttttagtagagacgaggtttcaccatgttggccaggctggtctcgatctcctgacctcaggtgatccacctgccttggcctcccaaagtgctgggattacaggcgtgagccaccgtgcctggcttgtgcattcttttttcattatttgatcgttaccttgctttctggcacaggatgttccaggcttgccctgtagtttgccttagtcctgaaattgactgtttcttccaagagccttataaaataagaaatgcttagaaaccaagatatggacacaagtagtgctgattgctgctggggtgttaattgcatcaagcagacagtactaaggaaatatattaaccttcaatataccagaaaaagcagtcatcaccatttaccatctaggtccagtggatcctgtttactgtttatatttttaagtaatttttgcaaataatttacaggtctaagaataagggttagtgaaaaacaattttattggaaagtttaatcagaatttaaacacagcagttctctttatattaagcaaatcttgatgcacaaagattataagagatttaagaatactgccacatgtcctcttagaacaatgagattatccaggttcttgcatcatgaagtctttcctgttgaatgactgactggatgggaatatcctatttcctttttgttcttacaagtatagtgttcactcacggattcttaatttttccttattctaatcagtcaactcttttttaacattcactaagttcagatgcatgtagttttcttcctccattggcatggtttcttctaggacttaaaacaatacaaagataaaccattacagaatgcctgctttaagaacctatttctggtgtcttcagggtttttttctcctagcctctgacctcaagaatttaaaaaacttacaggagtagaagaggaaatagagtttagagatcttttattctagcaatcttgttttattatggtaaactaaatatatttaataaaatctgccatttaacatttcttgtgtgtatacttttcagtgacattgattacattcactgttaggtaaccatcactattctttctaaaactttttcgtcaccccaaacagaaactctctacccattaagcaataacgctgtcattctcccctcccccaaaccccaagtcatttatgactatacattttgttgcttgtgttttttggtgtcatatctaagaatccattgccagatccaaggtcttgaagatttatacctatgtttccttctagggatttcatgattttagcgcttatatttaggtcattgatccgttttgagttaatttctgtatattcattgattgttgattttgagaaaattcatctaggatattttcatctgaaggctcataatctgagatttaatttatgctctcatttcaccatcacgagtgtctttctgcgctaaccaatgtggtagccattaaccacatgtggctattatacttaaattcaaaattcaaattaattaaaattaagtaaaataaaaattcagttttttggttacaatggccacatctcaagtgctcattagtcacatttggctattgactgttgtattggtctgtgctgatgaagattcccttcatcaaaaaaaaaatttattggacttcattggtcaagagtgctactagctctttatattcataatctgattcatttaataattgtgaagtatctttccatcacttttttcctctttccattataggcagaaagtaaaaacaatctgaattctcaactgtgtttattgaaagcgaaaagcagagtacaaagatggtgtctgttatcatttatactgtcttgaaagatgatgcaatatcctaggcaatgcagtagacaatggaaggatgatattttgctgttgattgcattatccttctgagtgattccataattcttccattttctcattttcttattagttttttttttttagagcgtagttaggaatagttgatcataaaataattactaaggtgatgatgaaatggcaagatgcaggaaaaacataatcactaggatcctgtagtgtatcttagacttacaaagccactgtattcatatggtaattgcagaataaaatgagttttttttttcttaataggaaaattttcttttgattccttggaaggcctctaagagaagataaaaggcatgaaatattaatccttgcaaatagttagaactactcaagaaagaaactaaaaaaataaaactgggttcaatggaccctgactgtataccctgatactttgaattcaaatccattaccacaaggttcttcttaaattttccccagtctatatttgaaactccccttctttcatagtgaaaaccttggttctcaacatctgcatttattcatttgctctatcctacaatatatacaaaatagcttcagaattactgcattaataccactgccaatggcaaacctgaagtaaagttcaaaatgtctttgcagtttcattggcttttgtgtaattaatgcttttggggtgtacagttagggtactgatcccaaaagtcacttgaattactttttttctgtgcagttataccttggatttttatttatattgaatcttagtatttgttttttatctttttcacttaattgcattttatgaatacatgaaaacatttgcatggttcaaaatcacaactaaatcaaaagttatccctactgaggtaattctgattcattcccattcctgctcttacttacccctacagataaacttttttttttttttttttttgagacagagtttcactcttgttgcccaggctggagtgcagtggcgcaatctcggctcactgcaacctccacatcccaggttcaagcaattctcctgcctcagcctcccaagtaactggaattacaggcgcccaccaccatgcccggctaatttaaaaaatatttttagtagaaatggagtttgaccatgttcgccagggtggtttcaaactcctgacctcaggtgatctgcccgcctcagcctcccaaagtgctaggattacaggtgtgaaccaccacagccggcctagataaccatttacattcacttttgacctgtccttcctctgtttcttcttcaaaaatacatgtgttcactttatctcccctccatactgctttcttatacaaaaggcagcttattttgccttttgttcatctcattaaatgataaacctgggaattactctggttcatagagatattcctcatcattttttttttatttttttggagatggagtctcgctctgttgctcaggctggagtgcagcggtgcattctcggctccgcctcccgggttcatgctattctcctgcctcagccaagctaattttttttttttttttaattttttagtagagacggggtttcactgtgttagccaggatggtctcgatctcctgacctcgtgatccgcctgcctcggcctcccaaagtgctgagattacaggcgtgagccaccgtgcccggcctccttatcatattttgtggttgcatagtgctttatgtctgtgtcatcagatattcagctgatatcttattgatgggcatttggtgttttttagtctcttgatagtatagataatgcctcagtaaatcactttatgcatatgttgtttctcatttgtgaagtaactttgggtaaagtcctagagttggattactgagtcaaagggtaaatttgtttagctttatccatatttataaccaccctctcaatgaactattatgtttaatttaatttataatgtgaaataaaaatacataagagaaatagaagaatattatatctgaaaactaggaattccttgaattggctgtttcctgtgatcttcattgccattttcccagttaccatttttttcttttctttttttttttctttcttcctgggttcaagtgattctcctgcctcagcctcccaagtagctgggattaacaggcacccaccaccgtgcccagctaatttttatatttttagttgagacaggatttcaccatgttgaccaggcaggtctcaaactcctgacctcaggtgatgtgccctccttggccccccaaagtgctgggattacaggcgtgagccaccgtgcctggcccagttatcatttcttacaaaagaggcagtaattcctggctggccttggtagttccactttgttcctcttctgtctatttcccagagtagtctttttttttttttattttttgagatggagtttcgctcttgttgcccaggctggagtgcaatggagtggtcttggctcattgcaacctccacatcctgggttcaagcgattctcctgcctcagcctcccatgttgctgggattacaggtgcccgccaccacacccagctaatttttgtatttttagtagagatgagcgccatgttggtcagtctggtctcaaactcctgacctcaggtgatccacctgtcttcggcctcccaaaattttacaggcatgagccacggcgcctggcccagagtagtcttttttttttttttttttttaagaaggtccaaatcaataggtcttttattgcatcattgaaatatcacaagtatgtcttaggagtcatctggcatcttctttctgtagctggataactcttagatctgattcatcaacctgctgaacagttcctttttcagagacatagataccatccaaaaatttcctgatatccttgtttttaactgttgtgggttgctgaatcaaagctgctgaatttgaaacaagctcagtgtcatttccttcaaggattaattcatctttctgggcttgaggtactgaacaggcaacacctggtctcatctgaaccctgcggatgtatttttcacccaagaaatttcggatttcaacaagagacccattctggataacgacgttgatgggggaagtgagcatacacagacctcatcttgtaatggaagcccagtgtaacacccttgatcatgttctgtacatgactacaaatagtccgaacggtagccagttcctttctgttacccgaccatttgtcaacccggagcctcttttttttctttccaaggagtctgagttctacgttgatgtgattgaagtccttccgcagggttcctctggggccctttatgataactgtgcgtcccttcagagtaacgttgacattttctggaatgtcaacagtctgattgctgagaatggtcttcattctcacagtaaacgcagcaaaaaaaagtggcccagagtagtctttttaagaatgcaaattggatgatgtcattttgtcattttcctgcttataattcttttggatttatcagcaggaaaaccgtaaaagaaatacaatttatgttttgaaattttaaaatggattccaagtttctgttgacatctgcaacttttcttctgttttcatgaatgtattaatcataaagtctattatattttataaatgcaatatgtcaatcaaatgaaggtctgcttttattccttccccttggtttctttatagccgcttttgtttttatagattgccttgtaccttgtaattttgaactggatgccagatattgtaacaaaaaattctagggattctggagggggttaagctttcttttagcagccagagtaatccttatggagtatgttgtctgtttcataaattatgtgattatttgtgtgtagctctgtttctctattctgttccattggattatttgcctgtaattgcaccagtatcacactcttactattttagctttataataggtcttgatatctagtagtaaaattcctctagcactttgttcttcaagattgtctttactattctgaccctttgcttttttgtatatattttaggatcacctttccaatactcaaaaaataacattactggggttttgcttggagtgcactggatctaaagatcggtttgaggagaattaagatgtttacaatattaagttttaaaatctatgaacatggtatatcaatttatttacttctataactttttagtattagcttttaaaagtatataaatcttcatgtgttagatttatttctagatactattttttgttgccttttgtaatttacttgctattcatttttttttttttttttgctggtaacatacttgatttttacatattgactttgttctaaaattttttgttgttgttaaaaaatagagatgagtttgctgtgttggccagactagtctccaactccaggcctcaagtgatccacccgcctctgcttcccaaagtgctgggaccacaacaagtgtgagccaccatgcctggcctaaatttatttgaattctaattacttgcctgtacattctgatagtatctgtgtagttacatacaggcatgttgtttgtaaatactgacagttttattcattccagttcttaagtttttttttatggttgtttgttttgttttgttttttgccctattgtatgggctagaacctttaatataatgtaaaataaaagttaggacattgggctttacataccaggagggcagttttaagtatttcaccatacagatgttcgtagttggctttttgtagctactcgttatgaaaataaggacattttctcctgttgctaattttatcattaatggatgctgaattttatcaaatgtattttctatgtttcttgagataacaatatggtaaattactttgattctttaaaaatattcaaatgccattgcattcctgcagcaaacccatttgtagaggatgtgtttaccttgttgtatattgctagattaaatttgataatattttattaaggtattttgttctgttacatgaggcaaaattctgtaattctttcttttcttttcttttttctttttttttgattaactctaccagggtgctgcggctcacacctgtaatcccagcactttgggaagctgaggtgggcggatcacgtgaggtcaggggtttgagatcagcctggccaacatggtgaaaccccatctctacaaaaaatacaaaaataagctgggtgtggtggcgggggcctgtaatcccagctactcggaaggttgaggcatgagaattgcttgaacccgggaggtggaggttgcagtgagttgagatcacgccactgcactccagcctgggcaagtgagactccgtctcaaaaaaaaaacaacaaaaaacattaacactaccttaaacctatgattttcttttcttgtaatgtcgacgtaaggatttggcttcagaattaggctggtctcatgaaacaactcccatttttgtatatcctataaaagtttatacactgttgttattggtttttgtgtgtgtgttttgtttttgtttttttgaaacagaatctcgctctcatccaggctggagtgcagtggccaatcctggctcattgcatcctggaactcccaggctcaggtgatcctctcgcctcagtctccccgagtagctggggctataggaatgcgccaccatgcctggctaatttttctgtattttttgtagagacagagtctcactatgttgcccaggctggtcttgaacttctgggatcaagctatccatctgccttggcttcccaaaatgatggactacaggctagtcagccactgtgcctggctcgtactgtttctaacttaaatgtttggaagagttcatcaacaaagccgtctgggcccaatatttttcttggacattttgtatggagattttaagatacgacctcaatttctttgaaagttcaaagactatccagattttctgtttctagttatatcattttagaaaatgtgattttcaaggaattgtcctttctaagttttcaagcttgttgtccctccgagttatcataatatcctgttatctttttattatcagtagatttggtggtgatgtcctctttttaattactgtaatttttaatttgtgggttttttcctcccttgatttctcttcttaagggtttatcaattttatattttatatttttgcctttgatttttttcctcttttctaagtctgctttctactttactgatttcttctctcttttttcctgtttaagattttcctttgcctgtaatttttctagcccttagagatgatggttgaggttactaatattaacctttccttattataagatatgcattttgagctttaaatttttctcttaatcattgccttaggtactgcacacattttgtatgtcattttccttatcagtcatttaaaaatagtttctaatttctattgtgatttgctcattgacccataaattggaaatacattccttttcaaacattattttctacttatttttctgtttctctagtgtggtcagagtacacattctgcataattgaaatttaagtcttgccttttgacctaatgttttctttttcttggtaaatttttcataatttacttggaaaaaaatgttaatcctgcagtttttgggttcagtatgtgtctgttagttcaggctgcttgaatatgttgttccagtattttatgtccttgttaatttttttgtctgctaattctatcatttattgagatatgtattaaaatagtcactaggattatagatttatttttctctctttttttaacctttgctttatatattttacagctatgttattcattgtatacaaatttaaaattgtaaaaacttcctggtcagttgaccttttcaccattctgagatatttttatctctagtaatgctacttgccttcaagtctcctttgttggatattagtattagtatggtcacaccagctaaatttgtttgttttgtctatctttaaaaaaaatcttcttaacttcagtcttttgggttcgaagtgtgtcttataaacagcatattgttgtggttttaatattcagtctagatatcttttccttttatttagagtattttaagccattatatgtagtaggattcctgatatatttaattttatcacctttctattagacgtacattgtatttattttttattcaaaaaattgtagtaaatataacaaaatttaccattttaataattttattttaagagactgtgtcttgctttgtcacccaggctggagtgcagtggtatggtcatagctcactgcaaccttgaactcctgagctcaagtgatcctgcctgagtctcctgagtagctgggactacaggtgcatgccattgggcctagctaattaaaaaaaaaaatttttttttttgtatagacagggactcactatgttgcccagggtggtctcgaactcctggcctcaagcggtcgtcctgccttggcctctcaaagtgctgggaaataggcatgagctaccatgaccagcccattttaatcatttttaagtatacagttcagtggcattgggtatattcacgttgttgatcaaccgtaattaccatccatctccaggcctttttttttttttttttttaaatcttgcaaaactgaaactctgttcattaaacaataactctctattcttccccttcctgatctggctgccagcattctattatactttttgtctctatgaatttgattactctaagtacctttaagtggaatcatagagtatttgtccttttgtgattgggttatttcacttaccataatgtctcaaggttcgtccacgttgtggcacatatcagaatttcttcctttttaaggctgaataatattccattgtattatagaatgtattatgcagtgtattatacgtttttgtttattttagcatccatggatacttgggttgcctctaccttatggtgattttgagtaatgctgctgtgaacatgggtgtttggtttaagtatctgcttttgattcttttttttttgtttttttttttttttgttgtttgttttgagatggagtttcactcttgttgcccaggctggagtgcaatggcacaatctcggctcactgcaacctctatctcctgggttcaagtgattctcctgcctcagcctcccaagtagctgagattacaggcatgcaccaccacccctggctaattttttgtgtttagtagagttggggtttcaccatgttggtcaggctggtctcgaactcctgacctcgggtgatccacccacctcggcctcccaaagtgctgggattacaggcgtgtgccactgcgcccggctgctttcgattcttctgggtatgctcagaggtggaatttctggatcatatggtaattctgtgtttaatttttaaggaactgccacactgctttctccggtgactgtaccattttacattcccggacaaattcacaagggttccagtccacatactgggcaacttttggcatttgcattggctgtttttgttttctgtaaggaccatcctcattactggagtgtcaaatggttccccattatagttctaattgatgtacttttatgttcttttttctctgctttttttttttccttcctttggatcaaacattttgtattgttatttcctcctattaacttgtttgtgatacattattttttactacttttatactgtacttatggtttagtactaaatataatatgtatttatagtatctttttttttttttttttttacaattccttttcactaagtaagtctctggtgtctctagagatcatagcattcattcatttatccagcccacctcttgcatgattgctcccatgcattttaattctacgtattttaaacaccacaacactgtatttaattgttctgtgtggtcaatattgatttatctttacccatctttttttttttttatcctgtacctttactcttcaattctttctgcatttatattactctgaagagtcctttttgttgttgttgctgtcttttttttaaccgatcacacttatttaataacaatatctagtttaataatttttttgataagacattttattaacaacatgtctagtttaataaaccgtatttcttttaatgaaagtctgctggtgcagaattctgtttctgttgaaaatgttattttttccttcatgttggaggatctatttgctgtgtatgtcactatagattttcagttattttttccagcatttcaagatactctgttatctttcactttctgtcattgatgttgaagttagctctagctctaagtcttgtcactcctttgaaggctgtgaatctcccctgtgcctcctccgcctacccccagctgcacataaagttttccctttttctttggttttcatcactgttaactatgttgtgccttgaaattttctttgtgcttctcttgcttgggattcttggagtttcttcagtctatcggctgatactttgatatcagttttagaaaatccagaattcaagatcttttcaatattgcttctgctgcattctctcttccctttctggatcttgcacttacactgtgtttcacatgtctcttattggtcttttctgtattttccatgttttatttttgaatctctgggctttaatttggtgttttcttttgacctgtcaagttcaaaaatcctgatttctgctgtttaatcttcttttaatgccatttattttaatttttggttcttcagttgtacaattttcattggtttcttcctgtagatttcagttctctagtgaaaattgctatttttaaaatatattccttttatcttttcctctatttccttgaacatattaatcattatgtttgttaacaccagtatctagattgcatgtgtgtttggttctgttttatatattttttcttttgacttttggtcatatgatcctgtttcttggcatcctagttatttttgactaaatcctgggattgtgtctttaaagattgtagatattcctgaaggtgataacttcctctggaaaaggcgcgtcctttcttctactgaagcagatgcagtgggagctggtcaccttactccgggcaggtgctgggtggagtgaaggccaggttgttgttttagtaagccatctgctgcttctggtttcttcaggctttcatctggaagcttgattttgctcactacaccatatttccttggaggcttctgaactaatttttgtttgatcctgagctctgcttttcagagttttagtttatctttttggccttcgcagctcagaatttgacagataccatgggagggaaagcagttgtatgcttaagacctctcttgtgctctcattttactaccatatagccttgtcagactgcgcaagttctgcttgtttctttctgctagccatggctgtctcctcagggcccaacataattctcagcctcttgcctgtgcctcctgttgtctgagaaaaaagtggcttcagatgatcagctcacttctccacagttctcccctctctgaatccttggtccctcttgtcctcactgctttggcagctcttgggtgcctttaaagagataatttttgtatttatctgtctgtctcttctactttctgagagttacaagctttttttgtcctacttggaggtattacgcaagtctagactgagttttgaatttacatagctacttgcagtgatttagtgtgatttgagatttttactacagtctcactgacagtggtggtttcttttgtttttgttttttgttttgtttttttttttttttttgagacggagttttgctctcgttgcccaggctggagtgcaatggcgtgaccttggctcactgcaacctctgctttccgggtttgattttcctgcctcagcctcctgagtagctgggattacaggcgcctgccacaacgcctggccaattttttgtatttttcgtagagatagggcttcaccatcttggccaggctgatctcaaactcctgatcttaggtgatccacctgtctcggcctcccaaagtgctgggattacaggtgtgagccaccacacccggccagtggtgtttaaaataaaaatgtacttctttaattaatgctaaataagattgctttaatttgacttttttgttacctgggagtatattttcctgtttttttttttttttcttctacttgtatttactcttcagtggactgtttgtttcctttgagcctttcacaggcacattctcctcctaacctgtgtggcaagtttgctactctaaagttttcttagttgcaaatcatacagatgcttaggaaattatgaaataatttactgtaagaagtcaggagggagtcaagggtaggagttttttgggtctctgtgttttgttttcttgtacatttatgttgtttcctgtaccagctgctttagatggttggttagcttgtgcagatcctatagtggtctttcttttaggaccagaatctgtaatcacctcaggctctgatgtccaaagtaaatgaggttggtccagttagcagcaggtatctatcctctccctttattgtggctacagacggagaaatgggattctttacccattctttatgggagaagggcagggtttctacgaggaaggcatgtgaatggagaagaaatgattgataatctctgataaaacagtgggcatgcaaggtggaattcaggcagtatttcagattcagaaatgtaggtcacaatttcttatctgcagttcggaagcctgaaaagcactgaaaacacagttattcttaagtttatggcatattcattgttgacaaaactggaacttatatgggtgaggcatttattacattttgaatattcatatgtttcattgcaaatgttatgtttactacatggccctacctcatggagctttcagccagaacagttagagttcctggatctctagttcaagtcacccccaaaaccctccaaacatgtaaacgtcttcattcttagaagtattactgaatgtatgtgtcaccactcttaaaatatttccaataggagaaaactgtaatagaatacttaagatagtgagtaatgattactgaaagaaaaaaagagcccagtttgtaggtaaagccaacaagggagggagatgtatagtgccagagcacgttagacatagtccgatatttgtgtaaaacgagactagattggcatacaggaaaaaatgcttagaagcctgtgtaggaggaatctggctaaaacataaaggtaaagattaaggagacttttgattccatcttagctaacattttaaataagaacatgtaagtgttttcagaagtggctccatataattggacttagctttcattagcagttttgctttgcagcatatttggaacataatttgtttaaaattgaaatggttttctttacttttatggtggttgatttatttatttatttatttatttttggggacagggtctctgtctgtctcccaggctggagtgcagtggtgtgatctcggctcactgcaacctccacctccttggttcaagcaattcaagctacctgagtagctggaattacaggcatgcaccaccacacctggctaatttttgtatttttggtagagacggggtttcaccatgttggctaggctggtctgaactcctggcatcatgtgatctactggcctgggcctcaaagtgctaagattacaggcgtgagccactctgctcaggctatggtggtttttatacagcaacactcagtttattacagtttatcccagtgcttattgcatttttttctgttaggaacctgtagtcaattcctcccttatttgcaaaggggtttacttaaaagatttgtaatttttgtaaattttgttgaaagtacactatttgtatactttggtaatgatatttatacatctacttgacaaatctatcttttaagaaattattttcagcttttaagtaactgtcacataacatgtatgtccagtatccattggcttcagctcccactgatactattttctttttgactcagcagctttaaaaccaaaatagtaagatctgtcttgaagccacagtctagcaggagaagcaaactatataaatttagacagctctgattagcacagttcccaaactgttatattatgcattaacccatacaggaagaatttaaaattgcagtatggtgagacaagttttagaagtgaagcatttttgagaaaagtatcaaagatgaagaagtactcttgaccttttaggctttctgttccagtctagttttagtgtggcattgtatttaacttgccttagaaactcataggtttatgccctcttgtggtctgtcaccaatataaatagcacaaatgaaaattttaagtactggagatcttactgcatgttactgctctcctttataaaataatttttaaaaagcagcttctgaggaacaacagctaagaaattattattcctgtcttccatataatgtgtggagcttaaaagttaccaaatgttattttaacccttggtaacaaaatgtatgtgtatgttaggtggacactaatgaacagaaaaatatttttggatgggctgtccatcattgtccttctaggtgtctaaccctattaatttataagtgtcttaaaaatatgatgaggtgtgatagtaattgtagggctagcacattacccttctaccttcacctaaacatacacagatatactagtaaatgatgcttgggaaatgtgtttatacttgtttcatctgaaagggtcaggagctgtaggaggcattggaagaaataaggattataatgttagtgaattggtgaacttaagcttacagaatttgcttttactgacatgattggcaaggtcttatttgtgagtgtgggactgaggaactaactagtggaggagaaacagcaatagcagtcagtgttttaagactgcagctgtaaccagtgtttttctgctgttatccagtaagccgcatgatggttggaagcaggccagtatagggactgtgcactttaggattagatagaatccctgatagaaagacttggttttaaaactggtctcatctcttaccagttcctggacagttgtgtaatattaagtaagttacttcatctctgaatacaggtttcctctccaaataaagatttaaaccgcctccattgaactctttgcagttcgttttgtcacatgcagtgttggcatatactcctgttgttattgctcataggttaaagacagttttgtgttgcaaagaatggataccatatgactttgtagccactgggttgttggtaaagactcctaaatagtggtaaatcagctcatagttctttttctttactgtggacttactgctgtacttctatgtaggtacatactttattataaattcttgagtgtaaacgaggtcattatgttaaagaatttactagttcaggtattttaaagttgaagcctagtaactatttttaagaaaaatgaaaataatacaataagttttttttctttaggggcactatttgcatgttttggcaggtttaaaaaataaacaaaaactagttttgttcttccattgtggtcttacttttgtggaggacaacaaagtaatgaaatgtttttgtttcttttgctgtgtttttcaagtgttgcttgtagaacaaggctcgctgccttatggttacttttaaaatttaatacttaaagtaattaatctgagtcccctttcaggagaaataagattatttagaataatttaacttaagggaaaaatatttgtttttataacaccttctaaaatttctaagttgtagaaatttactaattttttcttttttttttttttttttttttttgagatggagtctccttctgttgtccaggctggagtgcagtggcgcgatctcggctcactgcaagctctgcctcccaggttcatgccattctcctacctcagcctcccgagtagccaggactacaggcacctgccaccatgcccggccatttttttgtatttttagtagagatggggtttcactgtgttagccaggatggtctcgatctcctgacctcgtgatccacccacctcagcctcccaaagtgctgggattacaggcgtgagccaccgcgtctgaccaaaatttactaattttttcttttgaataacttgctgtgaaatagaagacaactaaaaaaaaaaccctctaaatataatagaactgcttgggcttaaatcttttctgcaagtaggtggaccataaatcatataaacaaagataacctagacatgccatcagaaggctagtctatatatttttatatctacctctttcatctttccccttatttctgatttcccaaatgtcacttctttagtttacatttggatagtgcttatttgaagtctctgatattctacacactatatgtaactaataaagactttaaaatgtaaggcagcattttggtagtgaaaatttctcttgtacattgtgaaatggattttgttgttcgtctatcttcctagggagactgtttaagggaagtaaaaggaacagggcaagaatggccggaacgaagtggagggtagactatggggagtgatggcaagaacacatgccattctaccagtgacttgtttcttaaacataaaaagcatatgtgccaaatttgcatatttactaattaaaaaggcttcctggaaacattaggtagactatcttctataacctttaacaccgtcactaatggatatagcttagaagatttcctcgaaggtcctttaaataatgtaaatgattatgaatgtgtaactagttaatatgcagctacgaaaggattatcatgtagaggttaatgaacattctgctcttatggtttgcagggctttgctttctgtgcttttggctctcttcatgcttggaaacacatgcattgggattggaaaacatcctgactgttcttgggtctcatcttttaatggggttgttaaataggaactttatgaaaaggatttcatgagcatttttttcctttttcaatttacatttaattctatttgtctattttgtaattactgccaaatcagaaacagtgaaatggattgatgtagttttagcttggctcttccagatgtaaagtcagtactctattatatattgccactgttattaagtgttgctatgtgattgatacttactgagagatcttcattctaaaatggactttttatgctgagttaatgtgtagtatggttgggtttctgattatagcatgtattttggtacagaatttctgtcttagtatttaaaatgtcccaaaagaggacatttatttcaggaattaaatgttacaatagaggaatttagtgacaggtctaaaaaaaatcgtgtgtattttttttttttttttttttttttttttgctgggacgggatggtgaaacattgagcatatacaagagacaatattggtatttagagcagtgaactagagcagcgttttgcaaaccagataatgctgctctctttttctcatggcctagtcttaagcattttggctttcatcccctagtttctctgtctctaaaatggtatatggtattctagactgctgtttaaaatttttattaataggtaatttaaaagtagataattagcaatccttgaaaacagtgttaattcttaaattgtcattcaaaaatagtgttatttttttaaattgcatttttctttattgtctagtcttcttattttctgagcattttgagaatctactgacatatctccaaggaaaacaaataacttttgtacttaaattcattgttttagtattataaacatagtttaaactggctgtgaagtgcttacagtcttgatcataattcactggggaacaaatgagctgttcagagcatctccttatcccaagtatttcttcttgaaaatgtagtagaaaaatatcactgaattcattttttaatgcgtcagaataaaaattacaggtgaaaatgtttggagatatactgacaaaataaaatattgtcactacagtcattttttttaactgacgaaacgtggatgttacattggtttcttgttatttataacatttatgtattctacaaaatatgtaatattgaaaacaggtctgtagattgtacaaaatactagttatcttatatcatatgtcacctaatagttatgaagcgggttttgtaccaaagtatgaatcagaaagctgtaatttgttctgcagttatcagcctgcattagagggttatgataaagtgtgctgcttaaaaactaacgttcacatctctgtgcatttgacaaataaaaatgtatactgagatgctattaaatctgtaaagccaatgttctagttttcagatacactgatttttgtagctctgtgcatagctctgttttttcatgagtagttatctgttttcatgacaggtggtcactaactgccaagagagaatccagcattggtgagtgaaagatggttttattacacttctgaaatactgatggggtaacctacttgtgttcaaataatgtgtttactgtttgcgtgtgtgtgtatgtatgactagtaattgaattcttctagtagtctccattttgaatgcctttaatactaatttatattgtctttgacccttttctgaattacacatttctgatttcctgacgttgtgttaccacttgtatttattctaagtgccttttcttttctaagaataatattaatatcattatgaattggagactgagacatttttgaatgtgacttagctctattttggggatatttcttacattttagtagaaaaataatgggaatcagttactttaaaataatgatggaaatagggcacagaaatgttttcccaaagtttgaaaaaaaaatctaattttctacttttcagagcttgttttattgactgtactttttttttttttaagagagagcatatctattttaatgtgctaatctatagttaataggaccatgtttggtaaataacacactttcctttggcttctgaggaaaatgctcgatttaatggtgaataaaatcttatattatgagttgtcatgaagtatagctgttgatcttacagatatcaaattacaatatatccatgctgtgcttacgaaggttttactgagagaacaacaggagctgtcttgattattgtctgcagggttattgcaaaaatcatggtaactgcccctttagtggtgagattaaaccttcggttatacaccatcaagcatataatattttaaatttattttaagaggctttttcttcatgcctgagagatctccaaggaaataatttatagttagtgtatatcaaatgttttttggtttaaatgcacataggctgcaggcagtggataagagtgaaaattggtgcaatctgtacacatcatcttattaaattttgactattggcttgcagaaaataatctaaaactaataatatccactttataagtaaaaattcaggacttcattaattttcaataaatgcatcgttgtagttgcttccactggtggtgtaagtgtgttagcatttccataatggaccattcgcctttcattatacattcagttcaggttaaaacttgaaatacaagtcgttggccaaagaattttttcccctgcacatttagtcagagtggcccattttacaaataatttccagaggaagtttattaacgtggacttctgtctattggttttggtaagaagttcaggaaattagaaaggtattcactggaaatagatgctagtttacataaatgggtgaatggtaacttgcttctggtttgttttataagattcttattagagttctttaaggataagggcacgttttcatccttttattcacagcccctactgctatgtttggcacaaaataggcacttgataaatgtttgagtaaatgaccaaatatgtggttattttctatataacattttagtttacaaatactctagtagtgcacaagtctagtgagcagtgacagaaatgtgacatttacttcatggcaggttcatgtgaccctcaatttcacttttcagttttgtaaaaccctctaaactgtagaagcttagcatatttgcctacacatatcttgaagtaatatagtactttatacatttaaaaaattatttttttccagttaaaatttgcattttcctctgaatcatttctggtttggttcaggaaacagacttttctctttgcttttaatgaagatctatacatggtatattgctcaaatctgaatggccagtaaattaatcaattcattatatcaaaaaattgaaaccaaagtgtcaccatttccctgaaagcaaggaaattgctgtttgggagagtcgtggaattcttgtgatatttttgcattctcttaattcctcaaacaatagttgagtttctaccatatgccagtattgtgctgctgtttggaattgaaagaccctgccatagaagaattcatagccagacatataacagggaaatcacgataattttgtgctatttgcggagatatgaagcaactacaggagttcagaggctggagccgttcttagggtgtctcacacactacttttaaaagcatgttgctttaattcctacttaacccttggtattagcctagtctaaaatataatttctgttaagcccctattctttatgagtacgcaccagtatagtaaagaagaacaaaatatatggtttgaaaaatgcattcttatgctggtgatgtttatgcttgtttgtataatttttaagggattctttaaggaacaagtatatgtattctaggctcagaaataatctaaattggtttttgtttaaaaaaaaatgtaggacagggagtaaaaatatttatagaaaaataggagtgaaaatggtctgggaccacaggatctacccaaaaaaatctttgagaaaattaatttaaatcctagaactttggtgaacgaagaaatttataatatttgtttagttaataacagataaaaaggaaagattcaagcctattggatgagaatttgtacattattttagagctaataataatggttttcagtttagtgaggatttaaaaaatgtttttgaatcaaactttttttctttataatcctttttaactaactcaggaaataaggtattatgaaatccacacactgttacctccttaaagtatgaggatacttcccactgtttggtccactagtggctgattattttgtttgtggattatttgtaattttctttttaattcttccttaaagagcatggcatttggagtcacagacctatatttgaatcctgtcatttactagcgttttgaccttgaacaattatgctcagagtctcagttttttcttgtaaagtgatgatgatactacttaactcacagggttgtagtgaagatcaaatgagatcatgtctgtagaacaccctgcccggcactcaataagtattaataggaacccatatacctcttttgaaaattttaattgtcagacaaataaaaaaaaaagccagtgctttgtaaatattcgtgaatatttagtgttcattctgtttttttgtcatgatggagagagagttgggtttctgtgaattactgttacagctttacattaatatttttaaatcactttttggtatgaagaatttcaaatgaaaggtgatagagtagtatagtgaatcctcatgtactcatcagtcggctttgataatcatcaactcatgattttctctaaactgttcatttcaacatcttatcttgccatctactcctacctccaatttttttttaacttttattttagatttgggaggtacatgtagaggtttgttgcaaaggtgcattgcatgatgctgagatttgaggtacaattgaacccatcacccagatagcatagtacccagtaggcagttattcagcccttgcccctgccctttctcaccgctcttgtattccccagtgtttatttgttcccatctttatgtccatgtgtccccagtggttagctcccacttataagtgagaatatacagtatttggttttctgtttctgcattagttcgcttaggatagtggcctcctgctgcatccatgttactgcaaatatttcttcttttttatgggtgtgtagtagtccatagtatatatgtatcacatttttgttatccagttcactgttgatgggcacttggattgattccatggctttgctattgtgatcattgtggtagtgaacatacaggtgcatgtatctttttggcagaatgctttttttttttgggtggtctgtattcagtaatggattgctgggttgaatggttgttcagtttagttctttcagaaatctccaaactgctgtccacagtggctggacattcccactaacagtgtaaaagcattccttttctttgcagtcctgccaacatctgttcttttttgactttttaataaaaactattttgcctatcccatctccagttttgaaatgaatctaagccgtatcattccatctggaaatatttcagtatatatctttaagagacaagaaagactatatattaactttttaagatttaaataaaaaatatttaatgagacaatacatttacatgtttcaaaatttaggaggtatgaaaggatgtaaatgatgtataggttcctcctaactttgtcccctaattctcagttctgtttactttttttttttttttttttttgagatggagtctcactctgtcatccaggctagagtgcaatggcatggtttcggctcactgcaacttctgcctcgcgggttcaagctattctcctgactcagcctccgaagtagctgagattacaggcgcgtgccgccatgcccagctaatttttttagtattttagtaaagacggggtttcaccgtgttgcccaggctggtctcgaactcctgagctcaggcaatgcaccctcctccgcctcctaaagtgctaggattacaggtgtgagccaccgcacccggcccctcagttctgttttctggaaacagcagttttttaccaatttctcataaatcttttcagaaatggtttgcataatgtaagtgtttgtgtatgtatgtgtgtgtgttgtgtgtgtgtattcatctacatgtttatatacggctcccatccttttggacaaaaatgaaatcagattgtacctgttcatttaatactatacctaccctgtatcattaactaacagttcctctttacctcattccatacattttgctgtatgtcagacatttaacttttaggattactaaatgagacctggaactatttttttttaaataaataattgctacatgactgagagtatagctctgaactcaaaatatatccttgctaagatgatatatctgttattttactgctccttagtaaaattactgcaaaacttagtggcttgaaacaaccaccatttacttgcacatgattcagtgggtgtgcatattaagctgggctcacctgtgtggttcttctgctagtcttgtgtgggctcactgctttggttgcagccagttggtggctgggtcagctttgttgtccagaatgacctcaccctcaagtctggtggttagtgctgttggttgagcctctgcctccatgtgctcttttgtccagcttactttctatgggcatctcagcagcaagaatggaagctgcaaggccacgttatgttggtcaaaggaagggccagcgcagattcacaaggtgggaagataacacccacctgttgagaggaggcgtgaaaaagaattaatggtcatttttaatgcactgcaatgactttattgaataggtcctacacacacaaaaaggaagtctccgtcctttatgttgactggtgagaatgaaatgaaatagtacatgtgatgcctggcagttcatctttatgttaggcattacttacaatcgtaaatcgtatgcatgtgagttgtaaaaaatttattgccttgcttcctttattttaaaaggatttttggtaaaggtatctttgaaattacatgaaacagacttaaatatagaagaagatactttgttcaggtgtttaattttggaaagaatactttaaatttagacataaaagttctaaaacactttggcatgtgagttttgagagagtctaaagcaaatactcaacatttttttatttttcaaaggaaactggacaaaaataattgttcagaggaaaagagtaactagcttccattagaatttatagttaaagtatatagtaggaaataaccaagaaagcatacctgtatagctaaaaatctcaggtgaagatttgattttctctctctcttttttttttttcctgttggagctactctttcctatcagtcgggatggagatacctgctttatgcacacattgtatatctgtctatatgtctcatgtttttgaggcattccttgtgcacagaagcactgaactatatcattgtaacaatgccatggtttacagtatatttcatatgaatacctgaaactgttttcttgagttgccttcacatgctatataaaatttattttattatgtataatatgtgaaatattgatctgcatacctttaaaacttgtaaaagccaatgacttttttctacagtgttaggtagatttgtaaactgtgtttttcagagtctgtattttactgactacaaagttttcagtcactgttttgtagagggccttctgtttgggctttttctttatgttattttttctttttttttttttttttccctcctcttgagcagagagcaactgccaaactttctggaaattttgcatgtttttgttgttggagtttctgtagttgtttatgaaagtcttagggataagggggaagaatcatatatgtcaaatcttgtcattaagtttctgcacagttttaaaaaatggtgtgagttagtacatgcgctagtgattaagtgagtttggaactcgtgtgtaatgtttcaaagcaaattaagaggcaaaaaaaaagattcaagttgaatgtttaaagaattttttttaaatctgagttaggtttttaaatgtttattctgaatataaaatgaatgcatgcttagttatggaaaagttgaaataagaaaggaataaagataaatttactcataattgtaaagagaagctaattctctccctgtttttaaaacattcccttttattccctctagcttcttaattctgtatgtgtatttatgtgactaaggtcaaactgtaaatgcatttttcttttccttctctttttaaagagttaaatgatttttaacttgtaattagaatttattacttgtaggagtcctcaagcttttatatcatgtttttggaagcaaccagctagtttaacgcacttctgaaaatgaaaggaaaacttacatgttataggagagtttttttcccctgaagagttttaaactattattaaaaaaaatccctaatcacatttcatcacctagaatagtccttgatgacgacgtgtttccagtgtcaatatggtttggttcagtttcccatgaccagctcaagtccagtatctgactgaggcaaagggcttagggcttactgctttgggcacacctcatgattttttatctttgtctcaactgtattaggtttgaaaactgtacttctttgtacttttttttcattttccatttttttttatgaagagtaacatccaataaaactcttaagcacagagtcctgtttgaggatgaagatgtgaatattgcaacaaccacagtgcttgtctgagaagtgcatcacttggtgataatcctgagtgcttgttcttattttgagaaatataagtccagattccactataccaaagacagattggggtgggtatcagtgtaagacctgagagaaatgtaggctgtgaaaaatggaggcatgcctataatttactttttactaattcatattgaactcatgatcaaattggtgagggttttcacatttttcttttatttttaagtcagttgataattttgaggtttttaaatatttggtaggttcaaaaccaggattgccatttttcactgttgtaaaacctcttgagaaactttaacccggaggtatctatgattgggcctctgctgaaactatatgtaaaatatgagttcttttctcagggaagagcctagagtttttctagtttctcatagggatcagtgacctaaaagggttttttaattgctactgtaattaagaaaacccacaaaattacttttttctaaaatatgctttagaaagaaaatatagaaagtgtaaagtagcaaaacctatgaattacggtaagatttaagtagaaatttgcacaaactttcaaagcttaagtcagctataaactcatcacaccttttctaaaaggtcctttcctttgatttgtaataggaatttatattagttatagaaaatttggaaaataaaaagaacaaaaattacatataaactcatcagtaaaaattaactaggcactttaggatatttctttcaaacgtagatgaatgtgtttttacataattttaaaggttttttgctttgaattcacatctcattttcttagagcaaaagattagtaatgagtgaagaaacaggcacctgtgataactgacaagtcttcaaacacatgtgtatggttgttgtagagagaacagtagaacagatttttctgtccaggcttactatatatatatatccattgcactgttttctcattgttgaaaagttaaattgaagaaatctagtagaatgttagctgcatctctctttagataattttgtttcattgacttgaaaaattatgtttttatatgcgggttaatcttggtatctatgtctaatagtaaagttttctgatggactcataaaatataaagaacatagattatttcatcagcatcttctgatgacataaattccttggtataatagagttataaaaaaggaatataccaccattctgcctgaattttgtggtacatttcagttacttatatcaattgaaattactgaatattttgccatgaccatttagaaaaaaagtgtaatgctattgatttaattcaagtacatttaaattttccatgaggagtgttccttttcccaccaaattgcataaagcataacagtatagatccctttttcaagaatttttaaataaaatgtaacttttatcaatttgtttagattgtttaaaaggatactttgaaaaaaatcattatttcttgctttagtaactggaggacatctctttatctatatagaatccatgcccaaacttaatattcctctattttcttgattttagaggtgaaaagccaggcatccttcaagctagtggatctttgacaaagatgcattgcaaaacaatcaacaaacaatcagaaaggcatgctatgtgtgagtgatgatccctgcagcatatgccataggcttgttgtagaggagctgctcagtaaatggtggattcaattgaaacaagtcttttttggatgcttaatgggaagttgtagggtgggtatgatggactaaaaattatttctaaagaaggttatatattgtatatattccagaatcttccgtttttatcgtttcttaaattaaaaaataaaaatttaactctgtcccaggttaactcagatgttaacacttatatagaaatttttttcctctttccccgttaggcatctcacagtattttctgcttgtctgtttaggatgttaggtagaggaaaagagagtgatagaagattttttttcttaaaaaaaaaaaaaaaaaaaaaaaaaaactgggccaggcatggtggctcacacctgtaatcccagcactctgggaggccgaagcgggtagatcacaaggtcagggttcgagaccagcctgaccaacatggtgaaaccccgtctctactaaaaatacaaaaattagccgggtgcggtggcgcgtgcctataatctcagctactcaggaggctgaggcaggagaatcgcttgaacctgggaggtggaggttgcagtgagccgagatcacgccacggcactccaggctgggtgaaagagtgagactccatctccaaaaaaaaaaaaaaaaaaaaaagttcaatgttagtatttgctgtctattttaacttcttactttaaagtaaaattagcaaagtcttattgtttcaacctgatttaaattttatctcccttttttattatttaaaggttggagtctttatcactggcctcaaaggatgtagactttttttttttaatagagatttttatttttgtcagtcacttttaagaggattaaaaatgttgatccctttcatatttcctcgtccctttaaaaatattctattatgacaaatttcaaacatatggaagagtgaatcttgatcacctatctgtctgtaccctaatccgttaatccatttttttctgatgaatttcaaattaagttgtggacatctgtgtatttcacccctaaatacttgagcatatccctcatttaacttgatttctctcttactttctacaattttatgcaaatgagctgtttcccataggttctgtcttgatcttaatcctttaagggtaagggctaacttgtggttgtgttaatggtcttcatcgctgctgcctattttttttttttaatttccttaaaacaaaaggtactctcaaaaggcatattgcacatgattagcaagattcagaaggaagtggttaaagtttcttacatgccttatacctatgcttttagttcttgttttgtataaggaatgttgcatgaggatattggaaaaaaatttaaaattaagagttgaaggcggaacctgatctataaggatccattatgttgaagccaaagaagcaggtctagctattctaagtaagtaggctggagaggtgtttcttaactctatctgggttttgttttccatttgaagaaaaattattttaagcaattaccatttttgattactgtaatgactcctgtgtccaaaaattaattacgtttctaattattaaaatagaaaaaaaaatctgttcaaattttgttataaataaagaccccagacttaacctcagtaatgcattagttcttagcataacttttgcattttctgttgcataggctttgtgatctttaacaggattatttaagcctgaaataatagagatactatttggagatcactgtttgactaagccctgaacatttccacgaatgtagcctttagagagagagggttcctcaagctgtagtttcttccagagacattgcttgactcctcctggcctcccttcataaaggatttctacatgggctgcattttaagtgatcttctacttttgtatttttagaaaataattcaaaatttataaatagcaactctaatcttaaactgctctccagtatgtccgcatttttattccagagagaattattaataagttgaaaactgattatatttgacttgaaatattgacattgatctctggtattgcctgtttttgaacgtactgttcttttaatgtacaaaatagatgttttttgtgaggaagttgtttttttttctcctaagcattgttaccaaaataagacttattgaatggtgactttaatactagcttcttaatattcatagaaatatttagatatctaggctggtgtatttagtccttgagcatttgcagaattacttatctgaaacataaataagctgttagtgttatgttattaatagtgagtgttgactgtctaggcactgtaccagtcagtcctatggagacattctcccattgattgctcacaccagtcctgtttccaaagcccctgaatggttacattcagctgtactgtctttcagcaagttatactatttgtatcaaattggttagtgaaatcttgtaggtaatagtctttcttgaaagttttggaattgatgttttttgatgcttcatgaaaaaaatgagttttgagttttggaaccaaaatagtagttgctccatgctgggcagtgtgttagaccttttatatttaattctgttgaacctgtgagataagtattagtccaattttgccattgaagttactaagactaaggtgaatttgtgtaaattgcatgtagagcttgggattcactctctggtctgacttcaaagccatgttctttctggtacatagccttgtgcatgaagtttttttgccattttatccatataaaaattttccaggaggaggatttttgccttaaacaaaagaataaaacatgtttcgtatttatttatagaaaaggattttttttggggaaagttataaagcagttgcacactagaaaatgagaaagctttcatgaaggaatgcaggtcagaagacctagctaggttaaactcattgcttacctcatcttgatagaggagatctggcttcttgctatgtggtttttccatcttccttctactttgtcttctgtaagagaaaaatactgataagtgacatttattataggttatgtaaaataatatatatgtgaaattccttaagatcttaagactgagctaatttttttttattaattatgctactgttgcttcagggaactaagcagtaagctgaaaccaattctgtgatgtttgtcatttatattatctggagagttgttacctacattgcagtttatcctgatttcaatttgacaatgtctacatgttcttttaaattacttgctgagttggtgaatttttgtttctgttatttttaaaaactgacaacatccttctgcttaaaaaaaattcagtgctgtagttttgcttgcagcctgtatcttagcagggaaccctttggaaacccagtctccagagaaagtttgacgggcatcttggcataggctgctgcctggtattactcaaaaagaagggctgttcatttccagcaggtgttaagagctgagtaaggcccatagcatggaaatacgatcatctctgcccctacagagttacatataccttttggttgtttgaaattacttatttggtagctctgtttgatgtaacaagaaacagactcctaggccaaattgaaacgccttttgtattatctctacttaatttcttctacccccagttgattctctcttaccttaatcacattattatgaataattgaagagctgatgatgcatttttcagcctaaggttttctgatgaggactaaagcatctgatcaaatttcatgttcatgatttcaacttcacagccagtatctattcactcaaaagctttattaaatctcttctttcggccgggtgtggtggctcatgcctgtaatcccagcactttgggaggctgcggtggggggatcgcttgaagccaggagttcgagaccagcctggccaacgtggcgaagaaacctaatctctatggaagatacaaaaattagctgggcgtggtgtcatgcgtctgtagtctcagctactcaggaggctaaggcaggggaatcacttgaacccaggaggtggaggttgcagtgagctgagattgtgccactgcactccagcctgggcaacagagagagactctgtcttaaaataaataaatctcttcttttttcatcttgagtcccttcttctctccaaatatcaggccctcttttactgtctcccttaattttcacattttatttggtccagatagtcttgtatcttaaaaaacagtaattctcaaaatttgagtattctgcttctaaatgccagagtccctgaagagtcttaattcttcaataaatgtatggtagaataatgccattgctaaactgtataaaaacaggattttaaaactaaaaataaaaccacattaatcttgaatttgctaaaattatgtttttgattagcttgttttatgatacctggcctactgggcctcccaaattgctgggattacaggcgtgagccaccacacacgactgaaagaagagatttaataaagcttttgagtgaggccaggtgcagtggctcacgcctgtaactctagcacttcaggaggctgaagtgggaggatcatgaggtcaggagttcaagaccagcctgaccaacatggtgaaacctcctctctactgaaaatacaaaaactagccttgcatggtggcgcacacttgtaatcccagctactcaggaggctgaggcaggagaattgcttgaacccgggaggtggagggtgcagtgagccgagatcacgccactgcactttagcctgggcgacggagcgacactctgtctcaaaaaaaaaaaaaaaaaaaaaaaaaaaaaaaaaaaaaaaaaaaaaaaaaaaaaaaaaagaaaaatcgttaataatgtgtgtatttggtgttttctgtcaacaggaagaaggtagataatgactataatgcccttcgagaaagactcagcaccttgcctgataaattgtcttataatataatggtatgtttggtgtgtttcttttaaagtaatagttgtttcttgtaaacatattaactatgtgtcggttcacagaatgtcaggctgatggactgtgtccaaggtaactatgtagcaaggaagatttgttttgttttactttataagaacacagtaattgtagtaattgttggtatttacctttttttttcagaatatatatggtgacacaaatgacataaatattagcacaaaattggacatatttcaaatggaaacttactatataaaaaatgtaattatgacagaaatatggtactaagtcgtttcttgttagccagagcaggaataggccataatgttttgtaattcacagaattaaaccttaggacattgatttttatataaaaacgtgctgctaatttttgttttaatgatcttcacatcgacatagtgatctgttcatgagccctggattagagcctttcattgcatgaatgttctttcttatgaagactttgttcttttatactagtccaagtattttgtatatatagctagatagatccattaaagctatttgtttactaattcctgctttgcaaaagtgtctactttattgaaaataatttttagttttctttatcaaaagtattttgcattgacaatgtttcactactagttgctttcacttagatttgcaagtgaatgaaaagtataaacatgccgagacagtactactttctttaagagctatatgtaaatatggtgtggatttattttcctgttttaacattgatttatgaacataaagcaattttctttagattttcctagtaaaattttaatatagtgttgaatttctgtgaagctggcattttatttttcccaatgtataaataaaaaaattcagttatgtaaggcttttaatgcgaagtgttttataaaatgtacttttcagtgttttatgttttttcccttttttctttttttttaaacaataggtaccatttggcccttttgccttcatgccaggaaaacttgtccatactaatgaagtcactgttttactgggggacaactggtttgcaaagtgctcagcaaagcaggctgtaggtttagttgagcaccggaaagaacgtaggtacccattttaaatgatgtttctttgttgtatatgtatccattcacagattgccaagctgaagggctgtttcttaccaaaagtaccttccgtgatctatgaatccaggctgtttgtgattctgttgaattgtaggtagtttgagtagaaccaacatttgagaatgagctggagaatggagcatccgggttggaaatgtcacctacattggcatgttttcagaagttacaaagtttcaaagtcattatgtgattttgtagttagaagttgggaagacataaaaattggagtcattttataccttataatttttttttagttgctattatagacttatttttgcacttaatactttagtacacagaaataatgtgttttctccttagtgaactaagagaaatacctgtttacataagtagacaattcttaaaaatgctttttggtttggaaaaaaaaccatattttcatttgatagaggagaccaggtgtgaaaaggtgctacctaaaacagcacccttatcctttttcagttgtttgagttctctgcatccctttattagggcagctcttgagttttgtttatccgtgctattatctgtaggtgtatagaagcctacatacacacacacaacacacactacacattttgcagttggatgagctagcttgggttctagcttagttatattttaaaattaggttcagtttataatctgttgttatttctgtaatacgtatttagattgagagtataatatccgccctacctgctttttaaccttttagttaaatgtgtatttgaaaataaatgatgggaagatccttttttataaataaggtcatactaaacagaaaacagctgagttttctaaagctgaacttgatttcacttatacatgaatgagtactagagaactcatttactcagtgaaattctgggaactatatttggagactctaattgcaaatcaactcctataagtttataattgatatatattttgatcttttgtgacactaatcagaatcttattgttaggcctgtatgtaatttctggcaatgataaatcttttggctttgctgcattatttttgtcatgtatattagcgaaagagaatgggcatacttttttcttaaagaccttactgaagacgaagcctctctttatatactgaagtagctctgatgttatgaaatgaatccatagcctgttgaagtttgttcacattgattttcatatttcagtgaaaaaaatctttataattagttataacttaaaatattaatgggaatacttatactacaatagaatagagctctagagtagagaaacatgtttttgtaaatcactttctagtagttaaatatggttttggaaagtgaccaaacatagatgacttttgggatcaatatttatctaaaataattttcaaagtacatatttcctgttacaataaattctgggccgggcgcaggggctcatgcctgtaatcccagcactttgggaggacaaggcaggtggatcacctgaggtcaggagtccgagaccagcccgaccaacgtggtaaaacctcgtctctactaaaaatacaaaaattagccgggcgtggtggtgtgtgcctgtagtcccagctacttgggaggctgagacaggagaatcacttgaacccaggaggtggaggttgcagtgagctgagattgtgccactgcactccagcctgggcaacaaagcgaaattttgtctcaaaaaaaaaaaaaaaattacgtaaagctcttttattcacatggttttataatttatacctgaagaaaatacttaggtatattgttgtacttcacatttattaagaaaaggtactttatttttcttaaggcagaggaaatataaccagttaaacacatagtcatctatgtcatggttgattggggtaattggggaaggtctgagttacaacacgggtcatgatttgtttagccagcaccacagtcaggacacggaataggatacaagatactgctctcaggactcagctcctatcaaaacctccctcacactgccccttggtggtcacaccctacggctgcctactgctgaaggattgacgacttcacgtctgtgtcttttgagattagcttcttcacttgctgtaacgcctcatccaggtggttctgtgtattcaaagttcatttcttttattgctgaggagtgttccgttacatgcatatctattaaatgcacgtacagcagtttttccattcaccttttgagggacatttgggtgcttccattttttggcggttaggaacagagctgctgtaagcctttgtgtacaggtttttgtgcgaacatacatttttattgctgttggtaaatacctacaagtgagattgttagatcatatgataaatgtatgttcaatttttaagagactaccaagctgttttccaaagtggctgtatgatttacatctctttcagcagtgtgtgatagtggtatctttgcgtctctaccagccctcaatattgtcagtttaagaagtgtagccatttgaataggtgtatagtgattttagtttgcatcattgcctaatgatgttgagcattgattcatgcacttattttatctttgtgtcctcttttacctgttgaactcttttgcccattttaaaatattgggttatatatgcttttttttttttattttttgagatggagtctcactctgtcgcctaggctggagtgcagtggggcgatcttggctcactgcaaccttagcctccgaggttcgagcaattctcctgcctcagcctcctgagtagctgggattacagacatgcgccaccatgcccggctaatttttttgtacttttagtagagatggggtttcaccatgttggtcaggctggtcttgaactcctgacctcaggtgatccacccgcctcagcctctgaaagtgctgcgattacaggcgtgtgccattgcacctggcctgggttatatattttctttctttttttttgagatggagtctcactctgtcgcccaggctggagtgcagtggcgcgatgtcagttcatcgcaacctccgcctcccgggttcaagtgattctcctgctcagcctcctgagtagctgagattacaggtgcgtaccaccacgcccggctaatttttgtatttttagtagagacagggtttcaccatgttggtcaggctggtcttgaactcctgacctcatgatctgtccgccttgtggtccacccaccttggcctcccaaagtgctgagattacaggtatgagccaccgcaccccgctgcattgtatattttcttactgtcgttttgagagtttttttttttttaatatattctggatttatgttaaataggtgatgtgcaaatattttctcccactttgcatcttgtcttttcattctcttaacagtgtctttccagagcaagtttttaattatgaagttcagcttttagctttttttaatggatcatatgtgtggtgtcatatctaagaacgctttacctaaccttagttgttgaagattttcttctgtgttttcttctgaaagttttatactttgatattttacaattagatctgtgattgattttaagttaatttttgtttgaggtgtggggtttaggtcacggttcatttttcttgcatatggatgtccagttgctccaatactatgttgaaaatactgttctgtctccattgaaatgactttgcacctttgtcaaaatgaattggcaacaagaccatcttagataccacactaggatggttataataaaaaagacagtaacacttgttggtgaggatgtgaaaaaattggaaccctcattcattgctggtgggactgtaaactggggaagccactttggagaacagtttggaatttttcagcaagttaaacattgtgttttactgtgatctagcagttccacacctagatagtattctacccaagggaaataaaaatgtatgtccacaaatacttgtacatgaatattaagagcagcactgcttatagtagccgaaacatggaaacaacctaaatgtctatcaactaataacaggtgaataagtgtcgtacatccatgcagtggaatgttgtttggcaataaaaagatgtgtaccttgaaaacattagaataaattaaagaaaccagtcacaaaagaccatatattgtatgattccatttacatgaaatattcagaaaaggtaaatttataaaagaaaggagagtagtggctgcttagggccaggaaggtgtgagagagaatggagagtgactgctaaagagtatggagatttttaggggcaatgaaaatacaaaaatacagattttggtaatggttgcacaaccctttgaatatacgaaaaccatcaaattgtacattttaaatgggtgaattgtatgttatgtgaattataacttaaattgttaaaaaacaaatgaatgagccattttgtgtaattgtgtttttggaccatctgttctgtttctttatctatgtgtctgtctctttgctgatgccactctgttttgattactgtagcattatagtgttccttacagtgttccttaaagttggtagtacgggtgctctaagtttattctttccaaattgttttggctgttctacctcctttgcctttccatatacattttagaaaccactcgcttatgtttacaaaaactcctagtgggattttgattggaatcgcactaaatcaacacattaatttggggagaattgacctcttaactattaaatcttccagtgtgtaaatacttacagcctgtaaatacagtgtatctctgtatttaggacttctttaatcagttttgtagtttttgagcatacaggtcatatgcgttttgttaggtttatatctaagtgtttcaccttttgtggagctgttgtaaatgatggcattttaaaatcttgtttttcaagtgttctagtatatagaaataactctttttaaaaaagaattaacattgtatcctccattcatgctgaccacatttgttctctgaacttttttggggtagattccatgggattttctatgtagacaatcatgccttttgtaaatagctcctatttttttttattcctttccaaggtgtatacacttcatttctttttcttgccttacttccttggctaggacttgcagtataatattgaataggagtggtaagagtaggtaggtgtctttgtcttgaaactgatcttctggggaaaaatttggcattttattgttaagtgtgtgttagctgtaggttttttaaaaaaattaatactccctataagtttagggaactttctacctggttctaatttgcggattttttaaatgaaaatatgttgaattttgtccagtgtattttctgcatctattgatatgatcttgtagtttttcttctgtatctgttaatgtggtggattatattgattgatttttcttccctggatgaaccgcatttgatcatggtgtattctttcatgtattactggatttgatacattgagctttttttgtttaatatttgcatggcgtatatttttccatttcttttacttttatgctaactatatcatatttaaagtgggtttcttttttttgttcttttgagacagagtcttgctctattgcccaggctggagtgcagtggcctgatcttgactcactgcaacctccacctcccaagttcaagtggttctcccgcctcagcctcccgagtagtggggattacaggcgagtgccaccatgcccagctaatctttgtattttttatagagatggggtttcaccatgttggctaggctgatctcgaacccttgacctcaagtgatctgcctaccttggcctcccaaagtgctaggtttacaggcgtgagccactgtgcctggcctaaagtgagtttcttataggcagcatggatctttcctttttaattgattctgataatttcagtcttttaattgatgtacttagaccatttacatttaatgtaatatgtttggattcaggtttggcattcccccgtttttgttcctcttgttaccctttcttgtcctcttttagattatttaatatttttagtatcttattactctgttgttgctgaaataggaacttcttaaagtatttttaatgttacaaattagggattaatgtatttcacgtgaacttaaaagttttactctaaatacttgctttgagatttgctgaattcttttttacgttagagagcaatttttggcttagaaaggagtacatcttcaatgagactaagtgaaaagaccaggatttaatcagaggtttctacagtatagacaagtttttggtaattttgtttctgcatgtctctgtaatctacttttgaacaccggtatatagaatgacttgaaattctagtatctaggcaccatgtcttagaatttttggctgtgacaacaggcatttggccacatttctagtcattagtccagtgattaatgttaaacagttttacttataggatgatcttaatagattttcctttcaaagataatatggggagaattattttaccgtgtgtcttttgttcagaattgtatctgacacatttattttatcttatttttacttttgtcttaaaaatgcatacttagtcttcatttttacaataaagttatttttattaaatggaagagtggacatgaagggataagagcatgaactaggggtaatggctataggcttagagaagagatcagaagcaggaagaatttctgagcctgataggacttggcaactgattgaatgtgaaggttgaggggaagcattggatgagtggtgacctagaggcaatgttgttgacataatcaagtaagtttgtagatcactgcacactactttccctctaccagagagtaaaatgcacataggcacgttacttagaagccctgtaatgaaaaatatccctttagtcttgtttaatgttgtggttcccaaacttacttgattttgagaaacttttaaaatgtaatgtctgttatcttacagagcattctaaagaaaatcttgatttaggaatacatttttaggcagatttcagaagaaagtgggtgataagacgttagcaccgaatacagcttttttttttaagtgataggagaagaaagattgtatgaggtgcatcaggtcattcacaagatgggcttttttaaaaattatttttttagtaggttatatatggacatgatacaaaatctaaaggatatttattaaaaaacaactatgcttccttttcttgttctttaacatccagtttacctccctggaggcatcgctgttatcagtatcttactcattattccagggatattctgtgcatttacagccatagacttatgcattcctaccccaccctatacacctccactcaaattgtaggcacacttttatttttttgttttggcagcttgctgtcttattcttttcatggctatatagtattatattgtactctatttagccagtcctttactgataggcctttagatcgtcttcctttttttttgctgttaaaatcaatgctgcagtgaataacctctgtgtgtatgtgtgtgtgtgtgtgtgtgtatcatttgtacttgtgtgtatctgtagtataaatgacttaagatacaattgctggcatgaagtgaagtagatttttaactttgacagtgctggctttaacagactgactacacctttgccaacccaatgtgtttgcaaacttgttttgaaactgataccttattgtaggccccctggcactgctaactagctaacttactgtcttttcctccttttcctcccctcccctcccttcccttcccctcattcacatggttggtcagctataaccaccatccatctccagatatttttcatcttctcaaattaaaactgtaccagttaggtgataactccccattttttccttcctccccccatcccctggtaaccactattctactttccatatgaatttggctattctagataccttacataagtggaatcctacagcatttgtccttttgtgtctggattatttcacatagcataatgttttctaggttcatctgtgttgtagcacgtgtcagaatttccttttttttaaggatgaacaatattttattttgtgaataatgtgaattattctgttcgctattgtgaatagtgctgctatgaatataggtatacaaatatttatttagttccctgctttaaattatttggggtgtatatctgaaagtggaattgctggatcatatggaaattctgtggatttttttttttttttttgaggcagggtctcactctgttgcccaggctgggagtgcagtggtgcaatcttggctcactgcagcctccgcctcccaggttcaagagccttcctgcctcagcctcctgagtagctgggactacaggtgtgcaccaccatgcccgactaattttttgtatttttagtagagacagggtttcaccatgttggccaggctgatcttgaactcctgacctcaggtgatgcatctgcctcagtctcccaaagtgctgggattacaggtgtgagccaccacgcccggccctatgttgtattttttaaggaacctccattctgtctttcacagcagctgtaccattttatattctcaacaccaaaatacaaggaatccagttttcccacattcttgtcaacacttgttactatattttttatatataaaataaatatattttgaagtggcatatcatcaaggaatatagtttgaagtggatttgaagtgaagtatcagcagggttttgatttgtatttcttcagtgattaattatgttgagcatcttttcatgtgtttattggccacatgtatatcatctttggagaaatgtctattcaagtcttttgcccattttttatttgggttgtttgtttttcttgttcagttgtagttctttatatattctggatattagtcccttatcagaagtgtaatttgcaaatattttctcctggtctgttggttgcccttttactttcttcttttattttgtcttacttaaaaaaaaaaatagctgccaggtagagtgcccttttactttcttgataatgttgtttgatgcacaaaaatttttaattttcactgtccagttagtgtttttttgtttttgcctatgcttttcatgtcatatctaagaaattgttgccaaatgtcatgaagcagcttccctgtgtttttttttttgagtttcctagatttagctttcatttaggttgctgtatccattttatatatgcttgtaaggtaagggtccaactttattcttttgcatgtggttccagttttctcaacacgatttgctgaaaacactgtccttacctttttgaatggtttttacactcttgtcaaaaatcatttggtcatacatttatgaggtcttatgtctgagctttgtattctattttttggtccgtaagtctgtatttatgttggtaccacattattttgatgagggtagctttatagtaagttttgaaaacagaaagatgagacttacaacttagtttttctttttaaatattgttttggttattggggaacccttgagactccatgtgaattttagaatgggcttttctgtttttgcaaaaaaaaaattactggattttactgggagttgcactgagtctgttggttgccatgggtagtattgacatcctaattattaaatatattcactccgtgaacataggatatctatttatttgtgtcttatttgttttagcaacactttatagtttttagtgtgcaagtcttgcaccttcttaagagtttagtccttttggttctagtttaaatgaattgcttacaaatttcctttttagattgctcattgttagtgcatagaaatgcagttgatttttgtgtgttgattttgcatcctgcaactttgctgaattttttttattagctttacaagggtgttttgtgtgtgtgtgtgtgtgtgtattctttagggttttctgcatattacatataagattgtatcatatgttggtagtagagagaacttgacttctttccaatttggaggctttttatttgtttttcttgcttaattgctctagctagaacttctagtatgttgttgaatagacatgttcatagtgagcatccttgtcttattcccaatcttaggggagagactcgcagtctttcatcatagagtgtgatgtcagtgtggggttttcatatatggcctttattatgttatggaagttcccttctgtttctaatttattgagtttttttttttaatcatgaaaggttgttggattttgtcaaaggcttttttggattcaatcgagattaccatgttttttcctcttcattctgctaatgtagtatattacattgatttttatatgttgaacccatccttgcattccagggtgtggcagagatcattcttggtcatgatgtatcattcttttaatgtgctaccgtatttagtttgccagcattttgttgaggatttttatatgtatattcataagagaaattagcctgtagttttcatatttttatctggctggctcacagaatgtgttccctcccttttcattgtttagaagagtttgagaggattggtgttaattctttgaatgtttggtagaattcatctgtgaaagcatctcttcttggtcctttctttgttgggaggtttttgattactgattcaatatgctacttgttacaagtctattcagatttcagttttggtagtttgtgtttttctaggaatttgtctattttatctaaattatcaaacttgttggcagtcagttgtttgtactatttctgtataatcccattaatttctgtaatagtttttattgttccacttttgtttgtgattttagtgatttgaatcttctctttttttcttagacagtctaataaagatttgtcaattttgttgatcttgtaaaaaaccaacttttggttgcattaatttttcagcattttataaaaattctgttttgtttatcattctctaatctttgttattcctttcttctgttagctttgggttcagtttactctttcttttttttccagtttcttaaagtgtacagtgaagttactgatttgaagtatttctttttttttgatgtaggtatttacagctataaatatctttcttagcattgctttgctgcatcccataaattttcgttgagttttcatttttgttggtctcagggtattttctcttttcttttgagacagagtctcactcactctgttgccctggctggagtgcagtggtgcaatatcggctcactgtaacttccatctcccgcgttgaagggattcttctgcctcagcctccctagtagttgggactacaggtgagggctaccatgcctggctaatttttgtatttttagtagagtcggggtttcaccatgttgtccaggctagtcttgaattcctggcctcaagcaatctgcctgcctcggcctcctaaagtgctgggagccactgtgcccagccatattttttaattatgcctatgatttcttctttgacccattgacagattattttgtaaaattttcatatatttatgactttttccaattttccttctattaatgatttttaatgttattgagcattccagttagaaaagatactttatatgatttcaatcttgttaaatttttcgagacttattttgtggcctctcatatgacctatcctggtgactgttccatgtttcccttagaaggtgtgtatttttcctgttgttgggtggaggtttctatatatgtctattaggtctaattggtctttagtggtgttcatgttctttatttccttctggctgttctgtcctttattgaaaaggggatattcatgtctcctccagctattatggtgaaataatttctcccttctgttctgtacatttttgctttgtacatttgagctctgttaggtatgtatgtatttataattgttgtatcttgatagattgaaccttttatcagtgtgaaatatcctttgtctcttgtgacttttttaatttaaagtctattttgtctgatactactatagctacttcatttcttttttggttactattggtatggaatatctttttcattccttcactttcaacctatttgtgcccttagatctacaagtgagtctcttatagacagtatatagttggatcctttttttaaaacaattgattctgccaatttatgctttttgattgggaagtttaatctgtttacatgtatagtaattactgatgggggaaagactttcgctgttttgttattttctgcatgttttatagcttttttttgactcatttctatattactgccttcctttgtgtttgatttttttttatggtgaatggttttgatctccttttcacttctttttaaaatataggtattttctttgtggttaccatggcgattacatagaacatcctaaggttataaaatgtattttgaatttataccaacttaacttcaatcacatacagaggctttattcctgttcagctccttcacctctttatattatttgtgtcacaaattatatctttatatattgtgtctccattaatatagatgtccagtgatgtgtattcatttttctttatcacatagaaaagaaaaaagtggagttacaaaccaaaatgacagtaatacttatttttgcctatgtgtttacctttatcagagatctgtgttttcatatagctttgagttactgtcttttcatttctacccgaagaacttcctttagcatttcttggattgcaggtctagtggtgaggaatgccctcaactcttgtttatctgggaatatcttaaatttcccctcatttttaaaagactgttgttttgctaaacatagaattcttggatgaagtattttgtttctctctcagcactttttaaatatatgtcatcccataaccttctgtgcttcagggtttctgctgagaaatctgataatcttgttgaagatttcttgtttgtgatgagtggtttttctcttgatgctttcaagattctctctttgttgttgttcaacagtttgattatagtgtgtcttggtgtgggtctgggtttatcctacttggatttcgttgagcttcttggatttgtagattcgtaccttatcaagcaatgtgtatgctcttgagtatctccaataaggcatttcaaaatacaaatttatgattttagtttatgatagatgtatatagctttaaataaccacaaaccatcttaagacgttatttaaaaaaaagagcagcattcacttatcccttttggctcacagttcccattcctcagatgtaattactttctgtttttggctatttttactctgctctttttattcatattttccagtggttggcatatcctgtttttgtttacttcttttttttttaattttatgtattattaactacctgtctataatttaagaggaccatgtagcatttttacatgtcctccctgtctctgcttctctaatctttttgctattgttgtatcacaatttttgttgaatcagtattcatgcttagatattatgtaattccattttgttcttgtacaggcttttagttgaatttaactgctttttttgttgcatagttttctatgtgtctgtcattaattcagtcagatactttttttgttgttaaaaattttactgctggagtctttcattgtcttgcttcaatttggactggcttctctcctgatcaaaggagagccgtcttcctggtgtcttcttaccctgtttttgccttttatttatttcctgttttctgtttcccaaagcacccttttttcaggttctatttagtttgttggaatattgctttaagtaacttttgggaacctgctcggaggtacttctttgaatttttatgtatctgaataactcttatattccttatactcctgcttcttattgttaagtagactgtttagaattctaggtcttaagtaactgttgccctcagaattttggatacattattctgttacctcctgtctttaagtgttgctattgaaaatcttgatgctattttcgttttctttgtatataacttgtttttttgtttttaaagctttgagattcctttttggtccttattccccatgatctggaatacaacagtggtacaccttgaagccgtgctatggatcctttaaaatttgtttgctagtgcttagtaggccttttttgagtggaggcttaagtcctccagccgtgggaaatttatattagtaatttgaaaatttccttttcttgttgcctatttgtttgtccttgttgtaatttttgaagtgatttcttctgcatactcttttaaatcatgtattgactttaaaattttcctgtacatagtttcatttctggaagcactttttttttgttctttggctgtttctttgttacagcatcctgttcttgtttcatggatggagggtctttttttaaggagtatttgttttttcttttaaagttttcatctttaaacatttcctccatgtttcttttttcttctccctcttttctctcttgctctctttttttggtctctagcattaatgttcaagaatttcttcaaatgtctggtgatccttggctaaccatttatacttgcgttgagtactgtcaggaagctctgtgtgcataggcaaggtttgttgactgataggtattttttgtagggatttaaggtagcaagctgatttatttattttttttaaattgagcaatctttaagtatcagcagattctacaaaagagtcttctgatcttcttcatctagtgttctgagaaccaggctgggcgtttcaaggttcagtatgttcacttggaattaatcctcctggtttcactaagacattttctattctctttccacttccctattccctaccatctctacaaaccactctaagctgtgaatcttttgtttaagcaagaaaggagaaacctttcttgtgagattagggtttggggacctgttcttttcaaacttttatctagatctttggttaaagttcactcttcttttggaaatactctcaagtgaattgccttttccaggtccgatatcccagatcgacttgtagtagcttttcccagccacagttaggttccatttttttctgttgtgcaaagtccattatcagttgtgcagtttccaaaatttggttgacatttcttgtctattttctcttcaaatgtatttgtctttatgggtttatgcctttaaaaatttcttagttgttactttacctaaggtataggggaaaggcaaatactaagtacatgtattcaatgtgctattttaaagcagaagtccaaacctttgtactggtttaagaaggagtacatcctgtccagaggtttgtgagtatttccaccagggggcacgtcctgttgaagctgtcgaaagaatatttaaaaattccagcacacaaaagaaacgaggttgagaatagagtggtcacaaaggattcagtagagaattgcatatttacaggcttcatactattcagtacatatgaatatatggctaagtaaaaaagactcctttcacgaatgatgttcataacttttattagtgttttgcaaataatttttattacatctgcatttctgttcctttcaaatatatacaattctacaaactgttaactaaatgtttctaaatatttggtcttacttagtgagtaggcatatcgtttatctttaggtgaaaatgactgcttaagttcttatgaggttttaaattttcttttttggtttaaacatgtctttggaatttgcactgttaatttgctttaagtctcctttttcatagctaactcaaaggatttcagccagttctggacaaagattctgaattagtgaagactttaaaatattagcttatgcttgctgcacatttaacctgcagcctggttttgtcagctaaataaataaaaactatacctcattctatacttctgaaatcctagaaaatttaacttctgatttttagttaaaataacctgtgtttgaaaacaatcttctgtccttcaaattactaatttttttcttcaattttagtttttattttttggggtggggggaagtatctgtggagaactgtcttttgtacattttcacagctatttctttgatcccattgaatttgttttcttttttctataataattggtaactaaaatgtttgagattaaaatgaatacagatattgtctatatcacaaagtatatttctttttctctcagtagtgttatttgctataatttcagtgtggtttgaaattttgcttaattagatttcaacttagccatgtttggagcgttaaaattgattgagtctgtttaaatgatccatttttagtgacatgtatatttcacctcttaaaataaatttttggagaatagagtacaaaagctttagtgaaaaatgtaatagcatggtttctaatgttaaatctcagagttatagaaagaaatggaattaaattctcattctgcttttttaactgttgttcttttgaaacaacctgtagatacgaatttagacttgttatttactttgtacaaaatcgaaataggtgcttaccattctgctgtattttatgttattgtgagcaccaggttcgtttgccttgcggttgcccagctttcttttgtcttgtcttaaattttctgtatagctatctaattttttgttgctctaggacataggacttatgataatttaatagagatatatatctgcatatataatgtgtatgtgacggtgttggtgcttatcagtttgtggtatttctgagattctgatataaagtatatgcttttgagatctgatttcttaaccttgtgatagtggtttatattaatgtatgattcagaaagctttcttgaatttaaaaatggaactgtgcaatcgtatttcagtttttcataattaccctatttccaaaacactttgtttcttaaatggaatattcacacaactttttcttacatgcgtgagttatgatgaattttttttaaagtcaacaatagttgattgaaagtaactcctataacatcagtgaacaatcaattctttacacattgacaacccaaggctttcactgatacctttagcttagttgcacagtatttatatgtggatagacttttaaaaatgtacttagcttacctacctgccatttttaatattttccagtcttcttgaaaaaagttattgatttgacctcctacctaaaataatgttctttagatctaaagctggttagacacattatctgactgagtttactgaagcaaaaacattccataaccttaaccttttccctgaccccctgcttttaacaactgccgacatagttttatgctgttatgtgaccatgctcggatgaaatctgtcaaacagctccttgagttattaggctgtctgagtctgacctttctgcaatcaaagatatatgacttaagggctcagatttgccatggcaaccggtccaatttgctgccgtgagaaaaggtctaattgttgcagaaatttaatgatctagagcgacatcagggctgtgagattttatgaactgtttacaccgtaattttcattttgttaatgcagtcttttttttgtaacccattcatggctagagcataagtgattgtgttttatttaaaatagcattgcatagcatgagagccgtatcggagaacatgtgccactctcgagaagcccttcatatgtggtgatatttcacttttaactcccttccttattttcattcttttaaaagatattttaactgcttagacctttgccagacctgcattcatcattggtagagaaagaactatgtacttttctcctccatcctcttctgatctgcttactgattgagtgcctgttgtaaaacagtaggaaatcacagagcatctgggggaggaggtatcatatcactgtctattattctttatcagcgcttggccataaaaattctgtatttggagaaaagtaggatattgttcagcatataattatagttagaaaccccatgtattttttagatggtgccatttactgcttagcagagatttctactctgattacagaaacatgaattacttgttgcatttgtccagtattgggtagagaaatgtttgtgtctattctcaaattaaaatttttcctcaaataggttaatagagggtggtatttaggagatgttgaaaggctgtgtgttgtgttgttatgcagtttaacttggaaatggttgattatataccgtaaaaaatgtgttgtattttcagtcatctaatttaggaatattttctgttcaggaacagaataacttgtcttaatctatgttatctatgcattatccagctggacaaaaattacctgtgcaacaaaactgttatgaaatactgcattttatgtgatgatccaactagatatttatcctatagaaacctggtagcaccaggcagcatctacaatctagttctgtactctgtaatagagagaaaatatgttagacattttattacgaacaaagtaatgtgctatatatatagcacaaaaatacacagtataacttattaaaagtccatttaaaaggaaaatagtgtaagatttttgaaaagcattactgttaaatcatacttgtagtgtgataggactacagttaaaatattcctacaggtcgtatatatgccatgctttacataatggttgtgttcattgtttcagatgtaagaaaaacaatagatgacttaaaaaaagtgatgaaaaattttgaatccagagttgaattcacagaagatttgcagaaaatgagcgatgtgagtatttgtttttagtcttctatatttttagaaaatattttcaaagaaatatgaagctatcttacagccaaggaacaaattaattgaagtttaaaatgctttcagacatcttaggttgaatagttgctctttggataattttagtatgctggagatttgtgttgttaatacgctttttttttgtttaaaaaccaggctgcaggtgatattgttgacatacgagaagaaattaaatgtgacttcgaatttaaaggtaagcagtaagattgttttatgtgtagctgtttagatattttgatttttgttgattttcagtgggctttctgtgagatatttgggatttagaatacacttttaaattcataggatgccaacatttttctactcattgatttttttttatgtgaaacattaatggataaataacttttggttaaaaatgtgattcctgactggtctgttttagtggtgggattacatggcttttttctcccaaagttctccagtgctccaaacctctaaaactcagaagatgtatattctagacatggatctgctcctaatttgttctctgaccatggtgaagtcctaagatatcttttgctagtttttcttcttttaaaactgcagctttgtaagctgtttttggaagaatgaatgaatgtgggtgtatttcagccattcctcttatggtgcctgcagtggctttccctgcgcaggttgttcccatctccacccagtagatttcttttgccaaggctggcttatgtgtttgggtttacttctgtaaagccaatggttccttcgtcagttgtaaagtgttaacggtagtgaaattgtaaaaagtattacagatggcttattatttgctactgtagaagactgtacagtgtcttaaacaaatgtactgagcattcgttttgactttcagcactcatattttggtgatgaactcttaagataacttactggttgaaagaagccacatcacaagtaacaggaagtggctttagaaggtgaaataaaggatatgtatattaaagttgaacagaaagacaagatttttgtttgtggtgaccagtgacaaattatgagcgctacaggtctgaaataaaaattgttaactactgtcttatcaataatagttacagagaataaggctgtgaaacataatttgatattttcagatgtatgcaacaatgcagcaaatttgaatatatgatggactcgaggtcatctggtagtgccatatctcataacaggacgcatcttagacttcttcccattactttcccattactttgctttaataaagcaaataaagccttaatttgctttattaaaaaataatctattttttaaaatgaaaagcagatacctctgagttcagatttgacccatcttttttcctcacatgaagattacaaatgaagcagtttaaaaagtagagatgttcatatgtaaaatgataatagaactttacagagatgagccgccgttgtttccttgtagggtactcattccttggcagtgccctggagtttaaagtatcctgtcacaaggcttttgcacgttactgtagtaactagatttccttgagtaaggatggtaaatggaaatttatcatttatgtgttgcatttcgccttataaccagggtgcattgtggccatttcttatgcatttttgaagctcttctcacaaccttgaatgtgtatgcaggttctctggggctcttgttgaaatacagattctgattcagtgggtctagggtgtccttagagcttacacttctgaagtgttccccaaggacgccagtgctgttgatccatggaccacactttgagtagcaaggctgtaagagacattcatccttggagttctgtttggcttaaaaattgtgacccctctgtttcaatatttcccttgccccaaaagaaagtctcattaagtctgggtttgtgccttttttatgttggctattaacagccacgtcttttcctttttctaaatagcaaaacaccgaattgctcataaaccgcattccaaaccaaaaacttcagatatttttgaagcagatattgcaaatgatgtgaaatccaaggatttgctagctgataaagaactgtgggctcgacttgaagaactagagagacaggaagaattgctgggtgaacttgataggtacttgatgacaaattatctttccaagataatttgtttctatacacatttcctcattaatctttttcttcattaataaaataatatgtgttcattgaagaaaatgcagggaagcataatatattatcaataatcctttcacctcaagatgaacattaattctctggaatattttcttataggattgtgtgtttgtgcatattcccatgcatgtacatgtacttaaatacttaagatcaacatcttcattttttattatggcctattttatataattaattataccagatagttgacttttaataatcatggatttaatatatataatgttaaattttaaatgaagtatttttatgccacacccaggatagtgctctatctttgaatgtgttgtgaaaaacaaaaatacactttgaatttaaatttgatacagtaaaatgtttattcttgctttccttttataaactttggagcaggtaatttgtaatctggtcagatagctatatgtatgagaaactttacgaaattgctgtttgaaatacacattagcacacacttagaattgttaaaatgctaaatgaaatctgctactcgagaagttctatattattttgcttaaatgatgtaccatatgcaataattagtttctgtgaaaaatagggcaggaagcataaaagtttctttttcctagtgtttcacctataaattcttaggtctttttgattaactaatactattcattttttaaaaccagttttggatcttgtgatttttcttggtcatgattctctttctattttttgtatgatgttatttcagttctgttgcattttcaattttgttatttttgtaaggtcctcacatcttttatagaatcaagtatgataaatgttcactcatgcatatagatatattcgtgtgcatatgtataaatcctttatttttaaaaattacaataatacatgctcattgtaaaatattctgagtataggagtagaaaataagtgtgtattatgtggtttcaatttctggtctttagagataaatgttctctgaatttcttacaactttattattattgatactatatttatattgcatatggccaatatctttcttgcaaagataaaaaaattatcttctatattctacttatgtctgaataacctcaatatatagaagcagcataggaactgttttttgttaatttatttcaaaacatttttttgtttttgaacttagaattctagttttaaaaatactttattcaagatcttagtatttacccatggaaactaactggaaatttaaataatgtaaaattctagtatgtttgtttgatcttgttaattttcttccttgctagtaagcctgatactgtgattgcaaatggagaagatacgacatcttctgaagaggaaaaggaagatcgtaacacaaatgtgaatgcgatgcatcaagtaacagactctcatactccttgtcataaggatgttgcaagttcagaaccattcagtggtcaagtgaatagtcagttgaactgttcagtgaatggttccagttcttaccacagtgatgatgatgatgatgatgatgatgacgacgacgacgacaacattgacgacgatgatggtgataacgaccatgaggctttaggggttggagataattctataccaacaatatatttttcacatactgttgagcctaagagggtttgtatacttttaactttactaattttgcatataatttgaacattaagcattatgatattttttagaagagcaatattaacaatcattatcattgtggatagtgccagacaggaaaatcatcttttgcctcttgttctgaccaatttaagaagaaaaagggaaaaaaaatttagttagctggtattggtccattgttctctgaaacaatgcattgtttggggtctggaaggggatcagatttgagtggcaactactgtaacttcacctgtccttcattcagagagttttcttaagaatcctggagttaattatattgtggacattttggtgtgcttaggatgttgaaagtgactgcattagttaaatttttaattatgccaggttgttttctatggacataaaatgaatacttcataggcacaaagggaaaatgtaggaggaagtaaaaattagtttcttttctgacaaagtaaatataaacatctgtggataatcatgacttagaattttggcattttagagctgggggtgactggagattttctaatacagagttttaaagcttttctctagtatgaaaagccttttgttccctccatacttactgtagaatcccagtatttaaaatagatcaaagcagcttggctctgattgaaggaaggataggctgccttaagtccatctttgccctctctctgctccatgtactgctctaaggggacactgggaattcgtctaattcgtctttctcagggaaatttaaggcctagaagacatagatctggttggtaacaaaacaggaactctttcgcctctgagtgccctttctacacaatatcccgattgcctgtatcagttaagggtctgtggtatcattcttaagtgtgtgtgattattatttagtgaaatatgtttaaaacatatttgatatttcttagcttcctaaagttattcctgctcctatatgaagtgaaataattgtttgtgtttttatattctaatatgtcagactgaaggggtcttcccctgattcttcgggaaaagttgactgagatgattagccagaaaaaaaggtcgctttttaatcttttgccaggcttttacttttttcctgttttcatttagataaaacagaaagaacaaatattatttgcaggaacgttacaggtaatagtggtcattattgtggaaagtatgctctaagtgctgactagggatagaaaaataacatgttaaccccatgtgaaccctgaacaggcttggtttttatttttttactccttcaatttctaaaaattagagatgttttaaaaattctaaataggcattatttaatagtacttttatgacttaaaggttgtattcttactgaatttttgtttatactctttcttttgaaatacataattcaagccaaacacttatatcaaaggaatggggtgatgggaagtttataagaaatctagcatttagttcaaatgtattttgctttctctacaataataaagacactgaagactaggatttgttaataaagaagattttctttagatgtcatagatctatgagataaggactttttaaaaaattccatctgataatgcacatcatttcagcatcagaaaatttcagctgcctctcttactattatttttttagttatagagtttatttgttttggtttcactttgatttaatttgtcaaaagattcttaatttcttgctctgaaattttaggtccgaataaatactggaaagaataccactttaaaattcagtgaaaagaaagaagaagccaaacgtaaacgaaagaacagcactggcagtggccactctgcccaggagctgccgaccatcaggacgcctgcagacatttacaggtgggaggcgctcacagctgcagggcagtctgctgggcttgcctctctttctgccactgaacctttactggagaaagttgactgtaacacagaagaccctcactgaaaagtgaagtgttctgaggagttaacttaggatctgataggctgaccggctgtagcttcccagtccagagcagtgggaatggaggattttttttttttttcactttctcctcttcaccagtgcttttgaaacatttccaaatggtctagtcagaaaatcttgtatcttcagaaagcatttttgtttccagtgggctaggtccctacgtttctaccacagccgtaacatgcttggcatgcagtttaccttttcagagtagaaattatactgttgcaggttttttttttttttccttttttttggaattgtttgttgagaaaactatcacttgaaaatacctactgtttttatgacccttatttataaatcagtgaaaattgctaaatgtatacgtgggtctaaaactttatgtagaattttggcaaaccatgctattgccacctaggacatgcttaaaaataacatgctgtgtttttgttctcactcataggtgggaattgaacaatgagaacacttggacacagggtggggaacaccacacaccggggtctgtcatggggtggggggaggggggaaggatagcattaggagatacacctaatgtaaatgatgagttaatgggtgcagcacaccaacatggcacatgtatacatatgtaacaaacctgcacgttgtgcacatgtaccctagaacttaaagtataataaaataaataaataacatgctgtgttttattattaggccagagaaatagctttcaaaatagtatgaagataccatttgaggctataaaattattgtgattgtgactattttagatataagattgtaataaaaattttcagattaatttctagaatagattcaaggaaattttcaaaaagttgttctcagttttatgagttacgtatagtgaatgcatatgtgttttgaatatcacagagcctttgttgatgttgtgaatggagaatatgtccctcgcaaatccatcctgaagtctcgaagtagagagaatagtgtgtgtagcgacactagtgaaagcagtgctgctgaatttgatgataggcggggagttttgaggagtatcagctgcgaagaagccacttgcagtgacaccagtgagagcattttggaagaggaaccacaagaaaatcaaaagaaacttttgcccttatcagtaacacctgaggtgtgtgtgtgtatcttttaattctttatttcatatagtatctttgaccagttttagctatttaatctgaaaagtcataagattaaattaattctaggttttatactttcttggtactaattaataaaaaattaatagtcacaaacagtacaaatattgtgataatcaaatagtttattttttgataaacacattacttgtcttaacgttctatttcagcaaaatgggaaatttaaaatgtcttacttggcattatgtattacatttgtagctaggaaattatttcgcagtttattttaaataaattaccagtaggtcattttctgatagtgtaaggagcagattacattattctcttttaaataccttggctaagttaaagaaaaataatgcatgcatagcagataattacctaaagtctaatattttaccttgtaccagtgaaacttaactcttgggggattatggaattgttttataatctgatgaaagctgtagaccctgtccatagaaaaaatagtgcacactcaatacactttcacccaccacacttcttacagtttttggtggtggtgcaggggaggttaggaaatccccaaataaggatgtctgtgaaatataaggctattgatttcttcattcttgtgttttggtgcgtatttgaagttttcaatttaaaaagtatttaggaagattggggaacccatgcctggatcaaaccagtgtacacatttgtatatacaataagatacatgcatatatataaccttatctaaaaattccattgcttttactaaatggtattatactcagtgtattaaatggtaattggggatggagattggtagcatttagggacagtacatatgactagaatgttttcttcccctcttcttagtataatgatcttaggtgacctggaaagtatcttaccttatttgatagtcttccatactgttagaaaacaggtaatggatgttatcaggtaattgctgataaatgtttgaaaattagttttttgtaaggacttagtgtatcatggtacagctagagtgtggaacctattttttatttcacccttagtagctttgcattttgtatggaaatgtttaatagtagttgctatacattttttaacatcaaagaaatagttcatgattatggtaagtactttggaagatatccttttcagtatctttttaaatgctaaaatacctctttttcaaaggcattttaaatagaagaaggagaagaaggctctatgctcatcgtgataaagtggagtttttaggaaagtaagctttaagctgcttttaccagttgaactccaaaaataatgtaggagagagatggctttctttgtttttgtttcagtggtggggcaaggtagaagaaggtggctttttaaattatttaggtgttacgttgttttaactaattttgagcacttggtagacagaggagaacaaaatgtacattaaagttcacctgtcaaattttcatttgtagagggaaggatggaggttctaaataccagcaatcttaaaaaaaaaaaaaaaattaactccttgtgtcttacctatttttgtataaaacgacatgtacagatatttccagcaatttatgcacattctttaattctgttccagttgaacatatagttgaccagattaaatgcagcaaacatccaggtgaaattgagtcatttctttttttgtggaacttctgatttctgtcattgagttaattatattaaaattttgaaacctgtacttattcctactagtatcagcacttttatttttcaacttccactgatcttttaaaattgaggcaatatgcagtaaaatatttaaataattgcataaacaccaccaaagagatatcagttagaaatgtcagtactggtgaaactaagctattggctagcaggcagcaaggccatcataggatagctcattcatcaactgatgtacaaaagtcagagtttgacaccctaatagcatttttattttaatacattatttttcacagcatgggctggacatgaatggaatgtatgaaagtttgaagaccttttatttatccatttcttttttttcccagataaaatttacattttacattttgttttcttgcatgtatactgtaaaaattacttctgtttggtggtgaaattaaaacttaatggtgttggtttctctgaacaattagtattttggtgtagtagtgttgtctagccaaaaatctcgtgaatttacttttaatgaaaagaattgccaaatgagtgaatgggaagattttgtgggtgtcttatttgcattttattaccataacctgacttttgttttctaggctttttctggaactgttatagaaaaagaatttgtatcaccttccttaacaccacccccagccattgctcatcccgcactacccactattccagaacgaaaggaagttctgttggaagcatctgaagaaactggaaagagggtttcaaagtttaaagctgccagattgcaacagaaagactaggccctgtctaggaaatgggaatttacatcctaaaacctagttgttcatttgtttagagtatctatagcaaaataggttacatgtagtttgaaataaggtatcctgagttactttggcaacaagttcttttacccttacccgtggtatttgaaaaaaatcaaggtaactgtctgaatactttaatatcagcttgttttgtgaattctctgaatactgtcaacactcttatctaagtttgcctttatgatgcagtggcagcattttgaattacttttcaaagaatactgttcatatgcattgtttttgtgtttcaaactaaatacaggcagttttgtgccagctgtgatattgtgcataccatatggaccattttaaagaaaattttaaaatttcaaatagattcaacaattacattacttgctttcacattttaaaggcactttaaaaaaatctacttctcttgtaggttttgcggctagttggctattcaagaaacctcgcccctctgaatgtcatactgtaatctttaaggaagaaagctacatgaattaattgtactctatgggaaaatttctttggaaagatattttgtaaaacttttttttccaagtaaaaactttatgaaacttggtctcaaaaatgttgtgaactttatgattcaaaattgagtacagatatgtccttgattcatatgtatgctacatgtatcacacaacagatctggaattctttcagttcctcagatacttctcccttagtttttgcagtttcactgggattatgttttgggaaacaaggaaaggtctagatgcttaaacattttaaataaaaattccttacagtttcatcttcccaacattttcattctttaaggctactttcctactaactgaaataacacatttacttttaccacaattcctcaaaataaatttattctaacattgaaaataacattacaagttaatcattagcttgatgcatgctaaaatgtagcttttaaaaagcattctgcattagtactaaaataagccatcaatgccagtccaccctctctattcatggctaaatatttaaaggttatttatagcttctttaatgaattcttcttaaacaaagtgaaattatgtcctagaaaagtagaagctattcgtaactagagcagtgcaactttaaagttttatgaatatgtattttaatgacaagggggcgagcttgcatccccactagttaatggataattcaaaccgaggactgattttgaaagatcacctaaaaatgtagatttgttctttagtaaatttagatcaactatgcatatattttgtaggtaaatctttcagtccatgccccaaccctcaccaaaaccaaagcagaaattacacacacaaagatgctcccgttaggaattgctattcacatgaggctttctgtgctagatttttttctcagaaacaaactttactgtaggactattgtggtgttcttaacagatttgtaatttcaagatgcgtgtcattaaataatttttcatgttcacagacttgattttgagcctgtctatgttacatctttcagataggttttccctcatagaacaagatggtagtagaagcagataaagtgtttgataacacatttttgcgtgttctgctctggagaccatgaaatagtgttgccccatttcatagcttcagtcttataacagagtattaaattgtaatttaaaattatagcttttttatattaaagtttgggacaaaatgaagctgtcttacctgttctgttttaaaccattataaaacagaacagcagaccaagagattctcttttaaactttctattttgaaatataataactttagtctttcagaaaattgcactaaatagtaccaagagttcccatataccctcatttcattcagcctccctcaatattgtaatatagaaccgtaatataattatccaaatcaggaaatttatgttggtgcaatagcgttagacctaaattacagatcttacttgaatttcaccaacttttccaccaaattttccattagaaaaagaactagtgttcttctgttcctcacatcttgtctatgaccctatcttgcatttatttgttacttactgctccttagtctttcctccaatctcagacagttcctcagtttgtctttcataactgatacttttgaagagtactggtgggatattttgaggatgttcctcagtttggatttatttgatgtactcagatgccttgaggttttgcaattttgaagagaataccacagaaaatgcatcatatcaagaggtgcattctagtgtgtcatttcaagttccttattttggtgtatcagtcttaatcacttggttaaggtggtgtctgccaggtatctccactgcaaaattactgtttccctttgtagttaatatcttgggagagatacatgagacatgaaaattcttttctcctccaacttatgctaagttttgcattcattagtggatcttgtctgtaacagttaccgctgtggtgtttgcctaaaggtgattttctgttttgctcttttgcacatttatttcttgaaattcttttataataacaagctttgcctccatacctctctctccaagtttatttgattatttatatctgtggacacctggatattttattatatgggttaaaattcattacttactatcattgttttgttgctcaaattcttctgcatttgcccattaggaactcctttgagttaactcctaggttctttaacaagttcccatatttttttgaacactttcttactggcaccacaaaatactacaggaccatctatttttcctctcccagccctggaaacaaccacttcaaggaaccctggttcctttaattggaaaatggtatttagaaaccaacatttgttcatttaagtatactaattgccaatagggtgtcattgcctcttgggcctttcaggagatacagctgggaaatatatgtatgtgtattaatgaatatacatttatgtgtctgcttattaaaaactcatgagttttgtactgatacttctgattctaatttaacaccacaggattaatttctggttttccttatttgttattttttccaatatgggtaacctgcctcttgtctgcagtgtatttacttactgtttttttgttgttgtgtcagtgtaatatacatgtagtttcagaagagctaattcataccctaggagaaacacattaactacattgcactgttctgcaattctttttgggttttgcctcatatatcagtcaagaaacagtttttcaaagttactgacgttcttttctttcccaccctctctgatctgtggactgatttgtactcttggtcctttttttactgtttgagcgttctctccacagcctggttgattttaatggtttattttttcagtatgtgaaacgtggttttcagagtgtgagctttgtaaaaggatatacatggagaagtgttgttcgtacctcattcctaccaccccattcccgttcccagctgctttctctcactttcccacctgcccatagtaagtaagctctagtttcttgtttagcctttctatgtctcttttgcacaaatccccacctacctactataaagaaccaatatttttagcttctggtttaacttttctatattctatactcatagcaaatacatgtatattttctttttcctttttttcttttcttttttctttttttttttgagacagggttacttttgcccaggctcaagtgcagtggtgcaatctcggctcactgcaacctctgcctcctgcgttcaggtgattctcatgcctcaacctcctgagcagctgggactacaggtacgtgccaccatgcgcaggtaatttttttttttttgtatgttttggtagagacagggttttgcatcttggtcaggttggtctagaacgcctgacctcaagtgatctacctccctcagcctcccaaagtgctggaattacaggcgtgagccactgtgcccggccaattttcttacatgcatttatttcttacatgaagaaagacattgtccattgcactttaattttttcagttaatattatgcccttgcgatccctctgtatcagtttttctgccttctttttttttttttttaaacagctatagtactccgttgtatagatggtacataatttgttcagccgctttcctaggtatgggcgtttaggttgtttgtgatgtttggcaattacatataatgatgcaatgaataactttatatatgtatttttgtatcattagaggtatatcttcagggtagatttctaggagtaggactgttgggccatatgaacacttactttgatttctttaaaacatagtaaaatctgttttgaagtatatttgttttgttcccttattgaggacatagtggttttttttgtttgtttgtttgagacggagtctcgctctgtcgcccaggctggagcgcagtggcccgatctcgactcactgcaagctctgcctcctggttcacgccattctcctgcctcagcctcccgagtagctggcactataggcacctgctaccacgcccggctaattttttgtatttttagtagagacggggtttcactgtgttagccaggatggtcttgatctcctgacctcatgatccacccgcctcggcctcccaaagtgctgggtttacaggtgtgtgccaccacgcctggcccgaggacatagttttaacatatacgtatgtctgcatatcattgatgattttttagaatgattctggggcagtatggtatcttaaaggggtttcagaatcattaaaaacattgtgttacataatgattatgttcattttactaaaatgtgatttttttaaaattggtcatgcatatttaagagctttccattcattgaaataattcctaatttgtgaaatgcaggtgtctattttacagatttgtctcctccataagaaacaggttttcaagggtaaaactgatctttatctatctgttctttaggtggtggcatgtaggctgtcaagcaaaggcctattaagtgaattcctcagttaaaataaatatgatttatatatttaattggtcagtattaaatttttacattttaaaataatttaaatttcattttagaagaatatcatttaggattaaagaatgtttttgcagttcccttaaccaataagtcacaaagagttaaatattttttttagcacttactatgtgtcatgcatttttagcacacttggtgtggattatctcatttaattgctcacagcatcccagtgaggtaggcactattgttttatccttcaccctcatcctaagacagagactaacattttaagccacacaactgttaagtaggttacactcaggcagctttgctccagaaccagcactcgtaacacatttttttgacttttttttttttttaacattgccatctaaacaagacactcagctagtgaggaaatatgtgatctatatgatgtctccataatttcacctacttacaatgaggccaccttttaaaaaatctgaatttttgaagcctgttttgtttgttaaactttctacataagaaaattaatgttgacttggtggaatagggtggagtttttcaatgatgttatttggccatatacacaaaaggaatatgataggtggagaatagtaaaattaagaagtaatcagtgtaacagtatttctctgaaaagctgctcatttttttatgtgaatttaggcattgtgtgcatgtgagtttaaaattagtgtgttcctcatcaagtgacctcatagtgaccgtttttatccctaatcatgttttttcctttagagagtaatagagctagatattttcctaatataacaggttccatcttttgtgtgtgagacagctttctgttttgtttttgtttatatgcatacatgcacctaatacaattatgctattattagcgtaaacagttgtttcagtacctttagtgatgtttggttacatggatgaattgtgcagtgatgaagttggagattttactgcatctgttacccgagtagtgtacgttgtacccaatatgtagttttttatccctcaccccacacccggcctcccccttctgggtctccagtgtccattatattactctactctgtatgccttttcgtacccatagcttagctcccacttataagtgagaacaggtggtatttggttttccacccctgagttacttcactggaggatagtggcctgcagttccatccaagttgctgcaaaagacatcatttcattcacttttatggctgagtagtatgccatggtgtatatgtaccacattttcgttatccacttattgactgacagacacttaggttggttccatatctttgcagctgtgaattgtgctgcaataaatgtgcagttgtcttttcgatacagtgacttcttttcctttgggtagatagtagtgggattgctggatcaaacggtagatctacttgtagttctttgagaaatctccatagtgttttccacagaggttgtactaatttacattcccaccagcagtgtataagtgttcccttttcatcacatccatgcattatctattgctttttgactttttagtaataaccattgtagctggggtaaggtggtatctcattgtggctttaatttgcatttccctaatgaatattttttcatgtttggccatttgtttatcttctttagagaaatgtctgtcatttgcccactttttaatgggattttttttcttgttgatttgtttgagttccttgtagattctggatattagtcctttgtcagatacatggtttgcaaatattttctcccgttttgtgggttgtctgtttactctgatgatgatttctttgactgtgcggatgcttcttaatctaattaggttattttttaaaatttattttattttattttttatttttttttgtgacggagtcttgctctgtcacctagactggagggagtaatctcggctcactgcaacctccacctcccaggttcacgtaattctcctgcctcagcctcccaagtagctgggattacaggcgtgtgcaaccacacctggctaatttttgtattcttaataatagagatggggtttcaccatgttggccagcctggtctcaaactcctgatctcacgtgatttacaaagttgtaaaaaaccctagctgaaataaaataaactacaagggtggctttaatacttctgaagacacaatagcactcgccttggcctcccaaagtgcagggattacaggcatgagccactgtgcccagccctaattaggttctatttattcatttttgtttttgttgcatttacttttggggtcttagtcataaattgtttgcctaggccaatgtctgggaaagtttttctaggttttcttctagaatttttatggtttcaggatttatatttgtttttaatccatcttcaattgatttgtgtatatcgtgagagatgaggatccagtttcattcttctacatgtggctatccagttttcccagcaccatttattgcatttattgactagggtgtccttttccccagttgatgtttttgtatgctttgttgaagatcagctggttctaagtatttgactttattcctgggttctctattctgttccattgttctatgtatctatttttataccagtgccatgctgttttggttactatagccttgtattataatttgaaggcaggtaatgtgatgcctccagatttattatttttgcttaggattactttggttatttgggctcttttttggttccatatgaacttcagaatttttttctaattttgtgaaaaatattgttagtattttgataggaattgtattacgtctgtgaattgctttgagcagtatgatatcgattcttccaatctgtgagtatgggatatatttccatttgtgtcatctgtgacgatttctttcagcagtgtttagtagcccaccttgttgtgatctttcacctccttggttaagtatattcctaagtattttattttattcttgtttttagcagttgtaaaagggattggattttttatttgattcacagcttggatgttggtgtacagcattgctactgatttgtgtagatttattatgtaacctgagactttactgaatttatttatcaaatttagaagtgttttggaggagtctttagggtcttccaggtgtaagattgtatcaatggtgaacagagataatttgacttcctcttttccaatttggataccctttatttctttctcttgcctgattgctctggctaggacttcctgaaaacagtttttaacctactctgacagtgtcttaaaactgtcaagtatagtctgtattttattgtaattactcttactgggaggactttactaatttgctttgggcattttatttaccctgcttgttgattgcctttccttttcttttttttttttttttaactgttgctcagacttaagtacttccctcttcctctactgatggggaagttacatatttgctatattttaatgttttggcacttgaaaagtatgtactattatcactttattgtagcgtttatagtacttggtttcatttgtgtctaacagctttattgaggtataatttacattctgtaacatccactttacagtatgcactttggggttttttagtagattttgagttgtgccatgttgaccacaactcagttgtagaacatttccattgttttaaaaacatcccttttgcctatttacagtaaattcctgttcctatccccaaccccgggacaccttaactaatatgctttctctatagagttctcttttctggacaattaatagaatcatacagtatgtagtgttttgcatttacctttcgatataaggtttttgaggttcatccattttttaaaaatcatgcatcagtaacttgttttttcttattgctgcatggtattacattgtatggatataccacattttgcttattcattcacaagttgatagaccctgaattgttcaggctataatcaataatgttgctatgaacattcatatatcagcccttgtgtgaatatgtgtttttatttatttagggtaaatacctaggagtggaattgttgggttggatggtgaattcaggtttaactttttaagaaattgcacagtttttcaaagaggctgtataattttatattcccatcagcaatgtttgagatttccagtttctccacatctttggcagcactgttactattttgtcttttttattatagcctttatagtggctgtggaatataataattgtattaatttacatttctgtagcgactaatgatgttgaaggtcttttcatgtgcttttagttctatttacatcttcttggaagtatctattcaaatctttggctcagtctttaattggttgtcttactgagttataagaagttctttttaaaaatttatttattttaattagagacagggtcttgctctgtcacccagtagggtgcagcgtcatgatcatggctcactgcagccttgacctcctgggctcaagtgatcctcccacctcagcctcctgagaagctgggattacaggcacgtgccaccatgcccagctaatttttaaattttttgcagaggcagggtctcgctgtgttgcccaggctgatctagaactcctagcttcaagcagtgctcctgcatagacctcccaaagtgctgggattacaggtgtgtttaagagttctttatatagtctaaatacaagccctttgtcaaatatatgaattgcaaatattttctctaagtctgtggcttgtctttgattttttaaatgtcttttgaagcacaaaatctttagttttaatgaagtccaattgatatacctcaatatatattatacctccataaagctgttagatacaaatgaaaccaaagtactatagacacaaatgaaaccaaagtactataaacactacaataaagtgatcataatagtacatactttttaagtgccaaaacatttatatatatatatatatatatatatatatatatatatatatatatatatatatttgtggttagtgtttttggtatcttatctaagaattctttaatccagaataataaaacttttctcccatgttttcttctagaagttttatacttcagctcttaagagttagggctatgatctgttttgtgtgtggggtgagtccagggtctaaatctgactttttgcacggataattttaataccatttaatagttctagagctgttgaaaagactgtcctttttgcagtgaatgctttagcatctttttttgaaaatagttgactataagcataaggttgtttgtgtactgagtgcttgtctgtccttatatcacttccagtggtcttaattactgtggctttacttacaacaaactttcaaatatggaactgttaaacccttcaattttgttctttttcaaaatttttttggggtattctgagccctttccatatccacataaattttaaggtcagcttacccacttctgcaaaaatgccttttgggatttttacagggattgtgttaaatctgtagatgaatttggggagaattgccatgcttatattgagtctgcgaatctgtgaacatggaatgtttatttgtttatatcttgattagtttctctcagtgtgtataaaagattactttcaaaacattgttttcagtttacaaatctttcgttaaatttattcctaaatttttaattctttcaggtgcagttgtaaatggagttttttccttaatgtcatttttgaattgttcgttgataatatatgtataattaatttttgtatattggctttgtatcctgcaaccttcctgagctcatttattagttcttgtcaagggggtgtgtgtgagagggagagtgagtgagtgtatgtgtgtgattgtatattctttaatatttgctacgtataggattgtgtcatttgtgaatagagaatcttacttctttccaatcttgattccttgtctttttcttgcctgattatattggctagagtctctagtaaaccttgaatagaagtgggtgagaacacctatccttccttgttcccaatcttagggagaagatattcaacctttcatcagtaggtatgatgttggctataggttttctgtagctgccttttattagattgagaaaaattccttttattcgtaggtttgttggagttttctttcatgaatggagttgaatttttcagacgctttttatgcagcccttgttccttctttagtataatacattaattttctgattaaattttctgattaaattaattttctgattaaaccaatcctgcattcctgggataaagcccatttttaatgtgcgtgatcctttttatatgttactgaatttggtttgctgatgttttgttgagaatatttgtgtatatattcatgagggatattgatctgtcatgttctatttttgtgatgtctttgtttggtttttatataaggataatattgacctcacaaaatcagatgggaagtatactcttctggatgaatttgtgaaggactagtactatttcttctttaaatgtttgatagaattcatcagtgaaaccattgggcctgcagttttctttgtgtgaagatttgtaattgctattaaagttcttattttaagtctatttaagttttatatttcttcttgagtccatttgataatttgactctttgtaggaatttgtccatttcatgtaaattattgcatttgtcatcataaagttgtccaaagtattcctttataatccatttaatttcttaagttggcagcaatttcctttttattttactttttttgtagagacagggtctcactatgttgtccaggctggtttcaaactcctaggctcaagtgatcctcctgccttggcctcccaaagtgctggtattgcatgtgtgaggcaccgtgcctggcctgtgatttccttctgattttgctaatttttgtcctatattttttgtaattctaactataggtctgtcagttttattgaccttttcagagaaactttttgattttgttgattttcctctagttttctattccagtgacttttactttaatctttattatttcctttcttcttccttgccttttatagtttttaaaggtgttaatctattgatttgagactactgtcttctaatgtaggtgtttaaagatataaattgacctctaggcactaacccttagctgcatccagtgacatttgatttgttttaatttttctgtagttaaaaatattttctaatttctcttgagatgtcttttttgactcatgggttactgtaatatgtattgtttaatttccaaatattagtgggtttctcaagtttctttctgttggttcctgctttaattgtgttgtgtctggagaaaacatttattatgtctttagtttttaaaaattcattaggactttttaaaaatgggtagcatatgttctcctgtgtgtgcttcaaaagaatacgtattctgttgttttatggagtgttctgttgatgtcatgtcaaggtcattgttattgttgtcttctgtattcttgctgattttttgtctacttgtgctatccgttattgagagtgggatactgaggccttacactattattgttaaatagtcctacctttcaagttctgttagtttttgtttcatgcatttttttctctgttgttaggtacatatatgtttgtcattgtcatatcttctgattaattgaagcttttattattacaaaatgtcccttttttctctagtaacattttaattttaaagcctatgtcagttttgtctgatatgattatgaccactccaccttggttatggttatgcttatgtggtatctcttttttcatcctttttagcatttgtatcttgtgggcagcatgtggttgaattttgtttttaaaaagtctattttgccagcctgtctttttattgaaatgtgtgttaattcatgtaattgttgatatggctcatttacatatcaatagctcatgccattttgttagtcattttttatatgtcatgtcttttttgttcctctgttcctccttggttacctttttttgtgtatgttaaataaatcttttagtataaactttgaattcctttacaaaaagaaactgtactttttttttttttaaacccacaaatttatttcttacatttgtggaaactgggaagtcaaggttagcagctgatttggttcctgccgagggctctcttcctgggctgcagatggcctcctgtgtcctcacatagtagaagagagctttactcttttttatgagttattttatagtggttgctctagagtttataggatgcattgtaacattataacctgcgtcagaataatactaacttaattctggcagactttgcttcagcatagctctagtctctttttcctttgtcctattattgtaatatattttataacagtacaggtttattatttataactatatgggttcattatttttccatgcaattatcttttaagtaagagaagaaaacttaaaaagagtattttttctattttttacatttgcctacataattacttttactggtactttaattttttatgtggattcaagttaccatctggtggtgtttcctttcagcctgaagtacttgctttagcatatcttgtaaaaaaaattttggtggcaacaaattctctttgtctatctgggaagatctttatttttgtcctcttttttgaaggatagttttactggatttagaattcttgtttgacagtagagtatgttataccacttaattctggccttcattgtttcttttgagaagtcagctgctaattttactggggttcccctgtgcatgataagtccatttttctcttgctgctttcaagattttgatgtgtatcggtgtggatattttaatgtttattctacttggattttattgagatacttggatatacagatttatacttcttactaaatttggaatgttttcagacattaaaaacttctatgactcttcaaaagatgtcaaaacttgtatggccctcactattcttttcttctgggattcccattatgcatatgttggtattgattgtaacccacagatttcctacttggttcatttttcattctcacttctgttcttcagattgtgtaatttgtattgatttatctttgagttcactgattcttccttctgcattcaagtttgctgttgtccctctaatgaagctttcactttagttacttttcaactccagaatttccattttttaaaaaatgttgatctctttattaagtgttctctgattagtcattgttttcatgctttgattaaacacggttttcttttgttctttgaagatgtatttttattggctgctttgaagtctgtctgttaagtccaacatttgggaacccttggaaatagcttctgtttatactgagtatttttttttttatactagataagccatactttcctgtttaaaactggacattttaaataatacattgtaacagcatttatttctgatactctcctgccaggggttattgtccctttttttgtttgttttatgacttggccaagattaataatgagtttttctctacagcgtgtggcctctgatgtctctcctcagttatgtttgactacttatgggtcaccttggatcaatatatcttagtgatcagctggtgactggtcagagattgtacttaggcatcttgttttggtaagactttcatcctttgtcaaagtctctgttttgtttgaggaacacactgaaaatttatgcagtttacgagtcttccctgggggtatgtatatagttagagccttctctggtctctcagcatgttcataccctaatatgcccattacctttcaaaatgtaagcttatcaaggactatgattgtctcacttcctgattgtttctgttaaatctccaggcagaaaatttttttcttctgatctcttttttggcccagctatagtatttcagcttcaggtcatctatgatgtatgtggacctctcctatgtttggcactgaaattgctatatttaacaaagcccctgggcgttgggtttttccacgttgtttcagattgagtcagctccctacagtataaatgcttctggttttacaagctgtcccaccctgttagaactattgtctgaaggagctggggtgagggagagtggtcacaatgccacatactgtcatcatttttacccaactttcagtagttttcttgaataaacacttctccatttgtcctatgttttggtcaatactcagaggtgaaaagtagttgtttttgataattttgtctaatttttttaaaagtctgttttttaagagcaattttagattcacagcagtactgagcagaaggtacagagattttccatatatcccatgctcccacacctgcatagcctcccctatcatcaacatccccaccagagtgatacatttgttacaatagttgaatatccattgccacagtagttgaatatccattgccacatcatcacccgaagttgatagtttgtattagaattcactcttggtggacattcagttgctttggataaatatataagaacacatatccaccattatagttgctgagtagtctcactgccctaaaaatcctctgtgctgtgcctattcatccgtccctatgccccaatacctggtaatcactgatttttaaaattgtctccatagttttgctttctctgggatgtcatgtagtcggaatcacataatgtttagctttttaagattggcttcgttctcctttgagtttccataatgtcttttcatggtttgatagatctgaaaataatattccattgtcgggatgtaccgcagttcatccattcacctactgaaggacatcttggttgctttcaagttttggcaagtacaagtaaaactgctataaacatcagtgtgtggctttttgtgtggacatacgttttcagcttctttgggtaaataccaagtggtatgattgacagatcatatggtaagactatgttttgtaagaaactgccaaaccgtcttccaatctagctgtactattttgcattcccaccagcaatgaatgaaagttcctgttgctccacattctagccaatatttggtggtgtcactgttctggattttggctattctaataggtgtgtagtggtaactcattgtcattttaattagcatttacctgataaaacatgatatggatcatcttttcagatgcttatttgccatctgtgtgtcttctggtgaggtgtctgttaaggactttggccccttttttagtcaggttgttttcttattgtgttcaatttaatacttatttgtgtatttcagataacaatcctttgtcagaaatgccttttgcaaatattttctcccagtctgtggtttgtctttatattctcttgacagtgtctttcacacagcagaaattttaatgaagtccagcttatcagtttattctttcatgaatcatgcctttgctgtcatatctaaaaggccattgctaaatccaaagtcatctagatttttctcctatattctagagttttgtagttttgcattttatatttaggtctgtgaccagttttgagttagtttttgtgaagggtgtatggtctgtgtctagatttgttttgcatatgatgtcaggttgctccagcactatttgttgcagactttctgctccattccattgccgttcctcctttgccaaagatcagttgactgtatttatgtagctctgtttctgagctgtctgtttcatttcattgacctgtttctctcttatcaataccatactgtctcgattgctgtagctttgtagtaagtcttgaagtctgaaaatgtcagttaactttgttctcctcccatattgtgttgggtattctgggtcttttacctctccatgtaaactttagaatcagtttattggtatctacaaaataatttgctgggattatgaatgggattgcattgaatctatagatcaagttggaaagaactgatatcttgacagttgaatcttcctgtccatgaacatggagtacctctccattgatttagttctttgatttcatttgtcagagttttgtatataagtcttgtacataacttattagatttaaacctaagtatttcattttgagggtgctactgtagatggtattgtgtttataatttcaaattccacttgttcactgctggtgtatagggaagtgattgaccattgtaaccttgctataatcacttataagtttcaggaggttttcttttttggttgattctttccagttttctacaaagatgactgtcatctatgtacaaagacagtttggcttcctccttccaaatgtgtataccttttatctctttttctgtattatcaaggacttgcaatatgaagttgaaaaggagtggtgagaggggatatccttgccttgttcctgattagtgggaaggcttcaagtttctcaccattaagtatgatgttagcgtgggtttttgtagatttttaaaaattaaattgaggaacttcaccctattcctagtttactgtgagtttttattattagcaggtgttggattttgccaaatgctttttcttcatctattgatgtgatcatgtgatttttttcttctttaccttgttgatgtgatagattacattgattttcaaatgttgaaccacccttgcatacctagaataaatctcacttggtcatggtgtataatataatcctttgcatacatttttggattcagtttaataatattttcttgagttttgcatctgtgtttattagcaatatttgtctgtagtttcttgtaatgtctttgcctgattttcatatggtaatgctgaactcatagaagtagggagtactccctgtgcttctatcatctgaaagagataggagagaattggtgtattttttttttttccttaaatgtttcatagaattcataagtgtatctgtctgggcctgcgctttgtgttttggaaagttattaattatttaatagagatagtcttattccgattgtctgtttcttctcgtgtgagttttggtagattgtgctcttcaaggaattggtccattttttctaggagtaccatatttgtgtgcatagacgtgttcatagtatttcttggttatccttttaatctccctgggatctgtaatgacattctctttttttatttctgaaatcagcaatttgtgtcctctctcttttttcttagttagcttgtcttactgattttatttatctaagaaccagcttttggtttggttgattttctctactgattttatgttttcaatttcattgatttctgctttaaatttttattcttctccttactttggaattaatttcctctcctttttctattcttataaggtgaaggcttagatgattaattttagatctctcttttctgatatatgcattcagtgttaaaaattttcctttaagcactgttttcactgcatcccacaaattttgataagttgtattttttatttttgttcaaaatattttaaaatttcttttgagactttctttgatccatgtgttacttagaagtgtgttgtttaatctccaagtatttgggagattttccagctatatttgttattgatttctagtttaattcaattgtgatgtgagagcagacactgtataattgctattttaaatttgttaaggtgtgttttatgaccccaagtgtgatttgtcttggttaatgttccatattagcttggaaaaaattatgtattctgctgttattgaatgaagtagtctgtagataaccattatatcaagttagtaaatggtgttaatgagttcagctgtgtccttaactgatcttttgactgctggatctgcccatttctgatagatgggtactgaagtttctaggtataatagtgaattcatctgtttctccttccagttctgtcagttttttcttatgtagtttgatgctctgtttttagatgcatacacattaaggattgctatgtcttcttggaaaattgacccctatgtaactgtagaatgctccttttttttcctgataactttccttaatctgaagtctgctctatctgaagtgaatataatgactctcactttcttttgattaatgttagcatggtatatctttctccatccatttactttcaatttatatgtgtctttaaggtttttgtagacagtgtatagttgggtcttattttttggttcattctgacaatttatttgtcttttaattggtacttttaaaccattggcatttaaaatgattattgatatcgttggattgacatctaccatatttttactgtttttatatttgttgcccttgttctttttcctgtttttgtcttccactctttttctgctgtttgggtttttttgtttgtttcttttctcttatcgatcccttgcctgttaaataccccttttgattttaattgagcattttttatgattccgttttctctacttagcatatcagttatactttttaaaagcatctttttagtagttgccctggagttcggaacatctacagctaatccaagtccactttgaaatgatgatactataccatttcatgggtaatgcaaatgccttacaacaatccttattcctcctctctgctgttccttgtattgttgctgttatttatttgactaacacatcagtatacataaacatgtatatgtacataggtatacaaaatcaaatgcattgttggtactattatttggaacaaattgttatctgttaaataggtaagaataagaaactaagtttctgttttacgtttacctcttccttatgctctttatgaagatccgaatttctgaactatatgattttccttctatctaaagaactcctttaacacttctggagtgcagtgccatgatcatggctcatggcagtctgaattcctggacttcagcgatcctcccaccttggcctcccaaagtgctgggatttcgggtgtaagccactgcacctggcctctctcctttattttcgaaggctatttctcaggatatagaattctaggttgatagttcttttctcttggtgctttaaatatttcactccactcttcttacttgcatgctttctaagaagttgggtataattctttcttttgcttctctataggtaatgtgtttttttccctctggtttctttcaggatttttctttatgaattcttatagtttgaaaatgatgatgcctaggtggaatgtttatcctgcttagtgttctctgagcttcctggatctgtatttggtgtcttataataattttggggaaattcttagttgttactgtttctgatatttcttcggttcctttttttttttcttctactgattttcccattttgcatatgctaccccctttgtaggtgtcttgcagttcctggatattctgttctggagtttgcagccttttttttttttctctctctctgtttccttttcagtttggaggtttctgttgagatatcctcaagctcagagattcctagctttattcagtctgctaatgagcccatcaaagcattcttcatttctcctgcagtgtttttgatctctagcctttctttttggtactttttagaatttccatctctctgcttacattgcccacttgtgtttgcatccatctagtttattcattagagcctttagtatattaatcatagctgttttaaattcctggtctgatcatgtcaacatccttgctatatctgtcttgttctgatgcttgctctatctctcaaatgaccttttttgcctttcagtatgcctggtgatttttccttaacagctgggcacgttcctgagtaagaggaaaggctgtaaataggcccttagtaatgtggatttctttagagttctatagtcctgtgatcaggtcttagtctttgagtgagcctgtgcctctagactgtgtacatcacatgtgcttctcatttcccccatcagccttactgaagacacgatgactagagggagctggtgtttggtatttctcttctcccacatggaaggcaggagctgcctgaggttatttcccttcccctaggtcagtttggccctgataaaaccccagcagtttatcttccggttaaatagtttctcctgcgggcaaaccttgttaagaagaacagagtgttttggcatgtttttaaatggttccttttccttttcccctgctgcaaacacagggggatagttctcagatacttgctttgagaacctggtagagctcctggaggtaaaactcacaaaagtatgtgtgccggggaatgactgagtccccctggaattttcaactcaagacttgtccacactgtgcagttaagttaattacagttcaggtttccctagcctgtcagttttccctggaggcctctgtctgagggtctcggctccagttacttgtgcttctctgcctttgcctgccggtcactccaatttcaggggccatgatagtttgccctgtggcttcactgttcttaactaagaattgatttttcagtttgtttagctgtttacttattaggatgtagtgacaacgtccaagcttgtatgccaggccagaaactaatagtccaactttatctttgctttttagggaaagtatttacaaaggtcctcactttgtcattcctctcaattacctttgaaactttttctttaaatgttaaattgtctacctgtgaatttaccatgttgagtgctcttcattattttctgtacattgaagttgccacctggttttcttttcctccagcctgtagaacttgctttaatcacgttttaaatggtccttcccgtaatgtgaagggcgggtgagcaaggcgctcagagccgtcgtggggaggaccatgttgcttccaagcatcctgctcaccagtacaccaggggttggaaaaaccacactaggcaaaggacttgtgtcaaaatcaggactgaaatacattaatgtgggtgatttagctcaagaagtctgatcatcgtatatcatggagtctggcaagatggcttctcccaagagcatgccgaaagatgcacagatgatggcacaaatcctgaaggatctgggaattacagaatatgagccaagacttataaatcagatgttagagtttgccttccgttatgtgaccacaattctagatgatgcaaaaatttactccagccatgctaagaaagctaccgttgatgcagatgatgtgcagttggcaatccagttccacgctgaccagtcttttacctctcttcccccaagagatttttttattagatatcgcaaggcaaagaaatcaaaccccttttccattaatcaagccatattcaggtcctagattgccacctgatagatattgcttaacagctccaaattataggctgaaatctttacagaaaaaggcatcaacttccacgggaagagtaacagtcccgcagttaagtgttggttcagttgctagcagaccaagtactcccacactaggcacaccaaccccacagaccatgtctgtttcaactaaagtagggactcccgtgtccctcacagggcaaaggtttacagtacagatgcctacttcacagtctccagctgtaaaatcttcaattcctgcaacatcagcagttcagaatgttctgattaatccatcattaattgggtccaaaagcttcttattaccactaatacggtgttatcacaaaatactgccaatgaatcatcaaatgcattgaaaaagcgtgaagaagatgattatgataatttgtaatttagccttgctgcatgtaacatgtatacttggtcttgaattcattgtactgatactaaacatgcgtgctggatgttttcaagttgtattttagaaaactttcatatttaatgagtaaatacaattaccatacttttcaattgaaatgaaggtttttcatcagccttaaaagtgtaagaaaaatcaagttgtcattaatttgaaaaaaataatgttttaaatgttggtgtgctagatcaagttctttcaacttttctctgaaataatattattttgcctttatatttgaaagatatttttgctaggtatagaatcccaagttgacaggttattttcctccctccctccctccctccctcccttctcccctcccctccgctcactcgctcgctttcttgcttgcttgcttgcttgcttgcttgcttgcttttctttctttctttctttctttctttctttctgtctctctctctctttctttcttttgagacgaggtctcgctctgtcactcaagctggaatgcaacagcatggatcatagctcactgcaacccttgggctcaagcagtcttcctgcctcagtctcctgagtacctgggactacagacacatgtcaccaggtccagctaatttttaaatttcatgtagagacggggtctcacaatgttgtctaggctggtcttgaacacctgggctcaagtgttccatcctcctgccttggcctcccaaaatgctgggattataggcatgagccccaccatgcatgacctggttttcttctctagcactttgaagatgttttcccttgtcttttgcacttcgtggtgctgtgttatcttttattagtcttatttcagttccactgtaggtagtatgcattttcctctggcaatctaattatgatatgcataggtatattctttgtgtttggtcttgtcagggcctgttgagtatcttggatctgcagatttagagttttcatcaaatgtggaaatattttggccatattttttccaattttgcttgggccccaatctctttttctcctgtttctggaacaccaattacatttatattgtatagttttttttctttttttttttttgagagcgagtctcgttctgtcacccaggctggagtacagtggtgagatcttggcttactgcaacctctgcccccaggattctagcgattctcctgcctcagcctcccgagtagctgggattacagatgcctgccaccatgcctggctaatttttttgtacttttagtagagatggggttttgccatgttcgccaggctggtctcaaactcttgacctcaggtgatctgcctgccttggcctcccaaagtgctgggattacaggtgtgagccaccatccccagcctattatatagcttttattgttccataaggtcaccgaggcttggttcatttttgtgtagtcctttttctttctgtgtttaattatggttaatttttattgatatatcttcatgttcactaaatttttatttttatttttttgtaatgtctgatttactcttgcacacatccagtaaattttttgtttcagatattatatttgaacatgcctacaggaatatacctgtatacctctaggatttccattttttaaataagatttttaatttctctttattatgttaatgattttctttaaattttgaagcatatttataatagctgttttaaagtcctcatctgctcattctatcatttctgtcatttttgtgtctattcctacctggctgtgggtcataatttggatcctattttcatgtttagtaatttttaatttgatgccagaatttttgttaatctttttattttggaataaacctagatttacggaaaagtttaaagataatgcagagagttctcatacgttcctcacccagttttagtgtcctctaatgtgaacacactacattaccaaggtacatgtgtcagaactaagaaattagcacaaggcaatactatttactaaagtatagactttattgaaatgttactagtttttctaccaatgttctttttcttttccaggattcattccaagatacctgttgtattttgtggtcatgtcttcttagtctcatcctatctgacaatttctcaattttttctttttcatgaccttgtacttttgaagagtattggcctgtgggtgttttacagaatattcctcaatttgagtttgcccagtgttttcttacaattagcctgaggttgtgagttttcaagagaataccatagatgtgaggtgtctttctctgcacataatatcactgcgttaatcttgattactttgttgagttggtacctgtttggtttctccactataagaccagtcttattttgcttggattccttctctctgtgctgtggtccaacaaacctctcaagacaaagagtgattataggacttacctcatttacttaggaatcttagtcttatatttcttggtcctagtgtctgaaaacacttgttttcagttttctagctgtttatggcagaagagcaaattctgtagccctgaatccttcaacactagagtcagaagtccttggcaggacctcttcttgagttccttgcttgcagtttctcagttaatttcatagcttgcagttcctctgatcttgacctacatgaaggccaactcacagctagcattcccaagggagacttgatatggtttggctctgtgtccccacctaaatctcatcttgaattgtactcccataattcccacgtgttgagggagggacctggtgggagataatttgaatcatggggactgtttcccccatactgttttgtggtagtgtgtctcatgagatctgatggttttatcaggggtttccacttttgcttcttcctcattttctcttgccgccaccatgtaagaagtgccttttggccgggtgcattggctcacacctgtaatcccagcactttgggaggctgaggtgggcagatcacaaggtcaggagttcaagaccagcctggccaacatggtgaaaccctgtctctacgaaaaatataaaaactagctgggcagggtggtgcattcctgcaatcccagctactcaggaggctgaggcaggagaattgcttgaaccaggacccaggaggtggaggttgcagtgagctgagatcacaccactgcattccagcctgtgctacagagcaagactctgtctcaaaaaaaaaaagcctttcacctcctgccatgattctgaggtctccccagccatgtggaactgtaagtcaaattaaacctcttttttcttcccagtcttgggtatgtcattattagcagtgtaaaaatggactgatacagtaaattggtaccagtagagtggagtgttgctgaaaagatacccaaaaatgtggaggcaactttggaactgggtaacaggcagagtttggagggctcagaagaagacaggaaaatgtgggaaggtttggaacttcctagagaattgttgaatggctttgacaaaaatactgataaaggtgtggacaatgaaatccaggctgacgtggtctcagatggagatgaagaacttgggaactggagcaaaggcgactcttgttatgttttagtgtaagagtctggtggcattttgcccctgccctagagatttgtggaactttgacttcagagagatgatttagcgtatctggcagaagaaatttctaggcagaaaagcattcaagaggtgacttggctgccattaaaggcattcagttttaaaagggaagcagagcataaaagtttggaaaatttgcagcctgacaatgcgatagaaaagaaaatcccattttctgaggagaaattcgagccgactgcagatatttgcataagtaacaaggagttgaatgttaatccccaagacaatggggaaaatgtctccaggtcatgttagagaactttgtggcagcctcttccatcacagatccggaggtctaggaggaaaaatggttttgtggagaggacctagagtccccgtgctatgtgcagtctagggacttggtgtcctgtgtcctagctgctccagctgtggctgaaaggggccaacatagtgcttaggccgtggcttcagagagtgcaagccccaagacttggaagcttccatgtggtggtgagcttgcaggtgcacagaagtcaagaactggggttttggaacctctgcctagatttcagaagatgtatggaaatgcctggatgcccaggcagaagtttgctgcaggggtggggctcttatgcaatgcagaagggaactgtgggatgggagcccccacaaagagtccctactggggcactgcctagtggagctgggagaagagggccaccatcctccagaccccggaatggtagatccacctatagcctgcactgtgagcctggaaaagctgcagacactcaatgccagcctgtgaaagcagccagaagggaggctgtaccctgcaaagtcacaggggtggagctgctcaagaccatgggaacccacctcttggcatcagtgtggcctggatgtgacacatgaagtcaaaggagatcattttgaaactttaaaatttgattgccccactagattttggacttgcatgggtcccgtaacccctttgttttggccaatttctttcatttggaacagctgtatttacccaatacttgtacccccgttgtatctaggaagtacctagcttgcttttgattttataggctcataggcagaaggggacttgccttgtctcagatgagactttggactgtggattttgggttaatgctgaaatgagttaagactttggtggactgttgggaaggcatggttggttttgaaatgtgaggacttgacatttggaggggccaggggcagaatgatatggtttggctctgtgtccccaccttaatctcatcttgaattgtatttccataactcccacatgttgtgggagggacctggtgggattgaatcatggggactgtttcccccagactgttcttgtggtagtgagtgtaagtctcatgagatctgatggttttatcaggggtttccacttttgcttcttcctcattttctcttgctgctgccatgtaagaagtgccttttgcctcctaccatgattctgaggccatcccagccatgtggaactgtaagtccaattaaatccctttcttcctagtctcaggtatgtctttatcagcagcgtgaaaacagactaatacaagactccacccttatctagagctcaggcagataggaacaagtttccttgctgtggttcgtgtttttgacagtgggaacatttgttctagtccagccgttcactctggcattctggcagcctttccggggtctggtcttcatgtatgatcttagttctaccatcttgttcgagctcaaggacttgccgcttatttcctggtgcttttaaaacataaatttcttggctaggtcccaggacagctctaacttgatgccagtggttttagctttttcttttccttcatttttagccactggtgatttctgttactttcatgcaagtaaggctctgtatttgagaagatatttattacattttatccagcatttatagcaggagagttggtggagtacactgtctgtagtgttcctaagcaattccttggtctgctgttctgctttataatggcttgaaacagaacacttaaggccagcttcagtttgtcccattgaaactttcatataaaaaagaaagctgtaattttaagttacaatttatttttatttttatttttttggagacgaagtctcactctgttgcccatgctggagtgtaatggcgcgatcttggctcactgccgacctctgcctcccgggttcaagtgattcttctgcctcagcctcccgagtagtagctgggattacaggcgtgcgccatcatgcttggctaagttttgtatttttagtagagacggggtttcaccatgttggtcaggctggtcttgaactcctgaccttaggtgatccacccgccttggcctcccagagtgctgggattacaggcatgagccactgtgcctggccttaagttacaattgaaaactgtaaggtactgtgctaagaaggccttcaagtaactgatcttcattgggaaggcaggttaagtgtataggtcgaaggagaataccagaagtgttccaggagctgtacactgagagttataacttgggagtcatagtatcttctttgaggtaagaaaactggcaactgcttcacgtcagaggaggtactctaggtagggttaaggatcaagtggatttctaggatggaaaaaatttgagtgttggggacagagatgatgaaattgaaacctacacgggttttatttatgccgtgttcgagtaataagaactcagagcctattatcagtaaaatgtatttttggagattacagatattttcttgggctccaagattttcttggtaatgtctatttgggatcttggaagctaaactgagggtaagaatggactgtcagtgatgatttgttggtgaatcgtatttgcaaagagggaatggttcagtctgataagaattgcaataaagacaaaaatgttgtggcttagggcagacttggctattctaagatacagagcggtgtctaggctagatccacctgtagtcacaaagacgtaagtttaatttttttacagttactggaaatctttcaaggagcacttgttaggagctaattgaggtgcaaccaaagagcagcactcagaacctcttcagaaaagtgaagtttgcaaatacttgcttgaaacttgaatgtgcttaagagcacggagccgaatgtgacctgtgcaggttttccacacggccaggactcagacctgtgtgtgtcttctgtgcggttgttgcacactccaaatctggtctgtgtgggttccttaataagaaagtcgctgtaggaaaagctgtccatgttggaactatgcaaaaatctctgagaattggaaagttttctggaaatctattgatttttttgaaaagtaaggaggtcagtttccaataacgatgaaagggaagaaaacccaaccaatgaatctatgattactaccacagtgggtgtttaaaacagaaatatttttggaacatgacattttatgttgcaatggaatcaactgatgagggcttgggatgggggattccctgatggttaatatcagattgactagggacattcttccacgccagccaatctcaggaacacgggaagacgtgagggctccacagggttaagtgtggactgcccatggaagagctgagggtttccctataattattcttcatactcttcatcttggtgatcattaacttggcatcagcaccctttgggggctatttgtccattttcagctgtttcctcttgaactataaaggctctctcaactttgaaatgtactgaccaggccacactagtaagttgtggagcctgaatatatggcagctgatgaatacaatgatgatggtagacatagccttccttacgacgggagccgcggaaaccatcagtcagtcgacacctttctggtaacctgggcgtggttcattacccaggtggcattctcttgctttggaaatttaaaaaatggcagatttctgtgtcctaatagtggcaaatgcagctgtttttgttgttcattttagcaaactaatgacttctgcaaaaagacgaaccaagattaaaagaaatcagatgtgtgtatttggtatgcaatatttttgtattacaaatagctacattctaacccacattaaccccatgatatgtgaattttgccaactcctgctatgtcttttaaatcaaatccggtaaatcactatgaatgttctaatttctaaacaaactagtcttccagtagaagtgctttaacactgtactgcaaattagacaacctaagataaatggaccatctttgttaattgtgtagtttaattgatcaaaactaccagataggatttttatagtgattttgcttagtatcaaattctatactattaaatagcttgtgagtcatatatttggggtcattaagatatatgctgttatttagcgtctgttaaccttattaagcaccttctttttggtctagttcatgtcacaatatgaaattgcttttaattgagatgaccaacttccattacattgttcaacccctgtacaaagcacttttcatttttgctctattgatcgagcagcaattgacttgaactatattcagaacctggtgggggaagatgggagaagatttcttgaaatgttctttttgctggtggtttttttctctgcataccccgctgtttgcttgtaactaattttgcatgccagtaggtagcagtggtgagcagaggcacagacagaaagctgccagtcagcgattataaattattattcatttctgttataggtggggtgtgcagtcagttacagtaataattaccaggactagagggtttcctaggcaaccaatttcccccctcattcatgctgttgctgagagagttcctgtaaagcatgacattgctgtattctgaggtttgttgcccccctgctgctccaggtttgaggttagttacagcatcataagacgctctcaagcatagagaactcaggctgggcttaaaaagcatgccggcagcagggcctctccgctgctgcttcacttttaagggacagggttccaaaaatgcaaatcctgcatcttgcttggtaacaggaagatctctttaagttgcagaaccttttattttttattattttgaagatagtggatcatttcatttttatagttttattatttgataaaaacgtgcagagacagacctaaaactagacttctccttaggatttgagtctaataaatcagtggggaactgtcacagctaatcatggttgtgtttgttgtttattcagttttatgaaaatggctcatgaagagaaaggcagcactcttcctgcagcagcagaattagtcctttatgtagtaggaaaataatggaaaccacatctattatccgggatctatacatgaatcatattatcctatatttgggggctctccaatctttcattttaatgaacttaacatcaagtgctttgcagtgataaaaaagtagtatttgtttgtgtctgctgtgaaaaaagataggggttcatgtttcagtcttacgtggagatgtgaaatgtttatccatttacaaggcagaagtcacaaacccagacacaaggcatccgatctcgtcctctgctagatgattacagacatgttcagtgcctcacattggacctgtgtatttatcaccgcaagttctcagcaggatgtaagttgtcttcgtcagtgttcttggtggggacaccaccagcgctaggcatgaccgatgagttccttgtctgtgaaccatgactgggctcttggacttctggagctgcttatacttcctgcaggtgcctgctgtgtattcaagggtgtggtggggaacctgcagtcaagttccaggagcagcgaggctgcatgcaggctggcttggtcctgcaagaggccactgctaacaactctatgcctttagccttccctgggtttctggaggaaagctgccttctgccctggacccagctccatcctgctccggaagtggccctagggtccagctgtgctgggcagtgagacctgccagtcaccatttgtccaaaacgtctcactgagaattggcttcccacttgagaaaatcttgaggtctaggccaggcgcggtggctcatgcctgtaatcccagcactttgggaggccgaggtgtttgggttacttgaggtcaggagttcaagaccagcctggccaatatggtgaaaccccgtctctactaaaaatacaaaaatttagccgggtgtggtggcgggtgcctgtaatcccagctactagggaggctgaggcaggagaattgcttgagcctgggaggcagagtttgtagtgagctgagatcgggccactgcactccagcctgggtgacagagtgagactctgtctcaaaaaacaaaacaaaacaaaaaaaggaaatcttgaggtccagtttcttgaaaacatctcaaaggtactaaacataagtgctcagtcaccctgttagatgtgggcttatggagtgattcataaaaatgaaatatggactatgtttttgatatagatactgtaaaatgtaattggctacatgaatccatcaggctgggttcatctgtagtttaggtttactttaaattgcttaataatctttttaaaagtatttataagccagaactatgagactagcacctgccagcccaaacagtattatcagggaatcccagtttttttttttttccccctgaatcgtttaacagcctaagtagtagagtgtctcttgaaacgtagcagtctgctatacttcaggtggggacttccacacaatttagcaaagaaaataatttttaaaaatgttcctattgcatactactctgtggcataaattatttaaatgcagtgcttagccaaactaatgttacagattagatgatgaactgataacgtcatatacagtaagttaaagacatgcaatgaagtcgttatttacttatggacaactacccttgcaaaacaaagtcaggaaaagtgggtgatgttcaaatgaggccatttgaactgtagcttcaaaataatcccctttaatttcattctctgcatctctaaattctggagaaagaaggaatgtcttcatcatcagaaggaccagtctcctgtttataaaatgataaagaaagttgggcagctcctccatcataagcttgctcttctggtttttttttttttcctttaaataattgaactgttacaggaaacattgttaaaatcttaaggttagggcatgctttcatttttttttgtctaaagattactctgcaccctagacaaaggaaatatttaaactgttaaatttgaacaaagatacagtctgcatatgacttctctgaagccctataaaaattctttaaaattgcctattcactcaaatttactgagtgtagcaaaaatgtcaaaggcataaagtcagagaagattgaataaaataatgcagaaagacagattagtcatgcacagacccacacagcctttcagagcacacaataccgctctttattaccgttctatctttacaaagactacgttcaatacatagaagatgatacatggccagccatgtcatctgcctgtgattccagaactcatctatctgggcccttttcacaatgacattgatgagagatcgcagtgttttcagagcattgttttatttatcatatataatggctggtgaaagaaataggaattatgtcaccgatagcacataaaagagttgcatagaagattctgtgacaaagtttggtaaaacccagaacaaggaagctcatggaaatgttcttttctctgtcttcccccactgctgtgtcttctccccctccgttcaagtcctccaaagatttgcacgctgataactgttgaaaaatatcaagaaaatgtttcatcaagccaaacgtcggggaccctgatcctttgttaaaaaaaaaaaactctttggcgattacatttttgtttaaatgtggagcacatttcaatgacggtagagttgccggccgttatttacgcatctgctaagggaaaggagactatttgtcagtcacagttttgtatcttgcaaatttaataaagagccgcccttaagatagaatttcttaggctgccacaattgacaaaagccagctaatgttgaaatgtcaacagcaaacctcatcagcaggcctcactgccgtgcaatcaagacagcgccatagctccatataaacaaatgtatataatgtgcctgtgttgggggtgggggtagggaaactggggatttcagtgctgtggggacacacagcacaggcttaaaacagtcccttcgacagcctttaaatgttaaggaatcagtgctgtgtatattacccagagagtctcagggagcgtggactcaaatgtgactggcagctgccttacaaaaggttatcttgcctgtgctccttgggaggactgtcaatcccatgcccatgggggaatttctcttccttccttccttcctttcttttctttcctcctttctttttccttccttcctccctcctttccttccttctttccttctttcttcccttccttcccttccttccttccttcctcctttcttctttccttcccttcctccctccctccttccctccctcgatccctccctccctttctttcttttttggagacagagtctccttatgttgttcaggctggagcacagtggcacgatcacggcttactgcagcctcaaactcctgggctcaggtgatcctctggcctcagactcctgagtagctgggaccacaggtgcacgccaccacatcaggctaactttttttttttaatcttttggtagaaatgggatcacactgtgttgctggcctcagactcctgggcttaaccaattctcctgcctcagcctcccaaagtgctgggatcatgggggaaatttctttaacttcctgtgcttttggtggtgtccaagagaaagctaaagaacaattttggggagtttcatgttttggagccatgaaccagccattgcactgaacttgaaagtttttcctcagaaccctgatctgggtgttcatccacagccatctcctgctttgctgagctgtttccttgtttgcagaaatcagcacagaaccacgcagaaggcagtgtggctgcggtgcaatgctgcatttggaagtgagtaaatggaagatgagacgtgcctgccttcactgtggggggaggatgagtttcccttgtccctgaggaagattggctttggtcctgtgttctccatggagagatcttgccttttcctatcccatcactatttcctttatagatggtgggctgaagacccagaagacctgcaagtgaatggaggctcggatccaaaagctaccccgagaccccagggtcttcactcctttatggcagtgtgagtggggcagacagggaagctaaggactccctgcttaggtggatggattcgagggatggagaggctcagaactgaggcccctgtgtttgtgctggccacagctctcctttcctcccagctcattgcaacctcagaaggcctgtcgagtgcctgtcagcctcctcctcctcctttccttccccctcctccttttctgtttcctcttcctcctctttttctacttctcctctttcttcttctcctgcttctttttcattgtcttctttcagctgctgcttgaccacccaagtcaactagggcaggacagcctccgcccaagctcccagggactccaaagctggctggtgcaactctcccaccctccctgtcctgcatggtgaggaaggcccagcacactcgctgtgcacagctcattgggtcctggaagacagaggcaagggggcagacccaggggaaacaaggcgtttttggagagagctgtgtgccatttatcgtctgcagccaggacacacgttttgccttggccatctttgagtcgctaggcagtgctcagatgcccctagatggtcttccctgcctcagagaaggctcctgcaggcagatgtccaaatgtttagcagagaggtggggttggtgagaggcagcatcctcatttgtggctttcctgccccaagaggaaccactgcttcttcagccttggattcctaacaattcatttaagggaggaacacttatttattctaaaggtttactgagccccgattatgcagtagacgctggggacagaataataaacaagacaggtttggtcactatctgcatggaacctaagagtctactgagaaaaatagcataatgcaaaatgggcccagagggtaatggggtgcggcgggggagttgggaagtcctctggaggaggcaacagttaccctgacctgaaggaggataggagcaagctgtgagggggagacagcggggaccaaggctcaaggcaggaacccctggggagtgcttggtgaggctagggtttagagcacaaggcagagagatagcgagaccatgggagaacctctggggccttgctggccaagggtgggatttattctcatgcagtgggaagcccatggcgggtcctgggcaggaagaactggctcgcattaaaagaaaatcactaggtctgccttcttcagaattgattgcaggaggcctggcatagaagcagggagaccagttattacaatcactcggtgagaggatggtggggacagtggagacagagggaaagcacacatgtcaaataccatacggattcaggactgatgggcacgggggagcagggcgggcgaggaccattgctaagccctgagatggaggatcctgtggagaggctgcagggactcggtgacacctggatactcagaaaagaaagggccccacgagacattccgcagcctcatcccaacctgaggagagatccacaggggactcacactcctgtttctacctcacaactcacacccaggcctggcacggtggcatgcacctgtcatcccagcgcttcgggaggctgaggtgggagggtcgcttgagcccaggagtttgagaccagcctggacaacacagcaatatcccatttctacaaaaaatttaaaaatttatatctatgagtgtgtgtgtgagtgtgtgtgtaaaacaaaagatccaagctcaaccctgttttgttacttttaaatttttttttttttttttgagatggagtctcactctttcgcccaagctggagtgcaatggtatgatatcgactcactgcaacctctgcctcctgggttcaagtgattctcttgcctcagcctcccgagtagctgggattacaggggccagccacgacgcccagctaacttttgtattattagtagagacagggtttcaccatgttggccaggctggtcctgaactcctgtcctcagatgatccacctgccttggcctcccaaagtgctgggattacaggcgtgaaccaccgtgcttggcctactttttaaaaattttacagccctgtttttggccctgccccttcggagctccctggcctgcttggatctgcttcctggatgaagtggagcccaagtgagacgtttcagcccgtggagtgggtgtgctgcgtggtgatactcaacacatagaggacattgatgaaacacggcaccgtggcccctctactgtgtttgggaggcggtgtgtgtccgcagagtaggtggtcactggagtcatggaggccaggggtgggcagaggatggggagagggaagcaggtccctttggactgaagtggtcaaaggacttcgctgagagggaggaggtggtgggcaggctgcggagggcagagtggcgggctacgaagcgcgcagcagggtcacacgagtgacgcccggggacaggtgcagaggggccgggctggctgcttccgaggaacagggaatgcagtggcaggaaacgctcgtggaagtcacataggtcagcccactgaggccacgggaggcgaagccccacagacggcagacagccctactctagaatccaggcttctgatcactatatttttcaaaaataagttgtatcagagatggagagatgatgttcccggtctgttagttgcgatgtgacttacaacagtgaaaaattagggacaatccaagtgtctgacagtaaggaactcgttaagaataaatgattataaaaatatgtgaccattaaggttttttaaggactttaaaaataacactggctactgctcatgatttatttaatattttgtgaaaacaggatatgactaccctattttgtgaaaaagacccaaatgcaaaaatatgtaactgtaccagtatgttttagagtggatcctccagagaagctgaaccaataggatggagatctctttctctatttatctatctaattaagtatgtatgtattatgtatgtatgtatctatctatcaaatctactatctatgtaatctctatctatcatctatctaatctactatctatgtttatctatctatctatctatctatctatctatctatctatctaatctattcatccatctcgaggttgattttaaagaattagctcatgcaattggaacagctggcaagttgaaatttacagggcaagccggcagcctggagactcagggaggagttgatgttgcatttccagtccaaaggttggctggaggtggaattccctcttccttaattctgttaagatctccaacaactggatgaggcccatcatattatggagagcaatctgctttattcaaagtctagtgacttcagtgtttatcacttctaacaaataccttcaagacaacatgtagactgatgtttgaccaataactgctaccatggcctaccctagttgacacatgcgattatccattactgatcaaccccagcttctacttttgcttttactttggaggagaggactagaaagaagactgtcagaattcattggtgggattctcaggtcacttatttacatttctgtctaccttcccaactatctgataaacatactttaaataattttagtatataaaatataaaacattacaataataaaagtgttctccttgcccatctgaggaaactgtcctttcaatatctgcaaaagggccatccttgtttgtatcaattgctcctctccataccctagccatggtatcgtttcttttattatctctcaaatttaccttttaaaattacagaatcatatcatatgacaggaaagatgaaaaaagcaaaaatcacctgcactcccaccaaatgatcggcattgtagttttattgccatttcgttttagattctttttcacagtgtgtatatgtacaaaacaccatcctacttttggaaactttttaaatattccatcgcatgacggtaccatatgtttactcagccaatctcctattgttggacactaatgttctttccagttttctgttattagaaacaatttggtcctaaacagctttgtatacagctctttgcacacatctctggttattttcctcaggattcattcctagaagaataattgctgggccaattgtacttttgaaaaattggacctgagtacatagaatggctttatcacaatacttggttcacatacagtcttccttgctctatgcatggcccatacacagtataattatttaaatgatactttctttttgtttttgagacagagtcttgttctgtcccccaagctggagtgcattggcacaatcatgtctcactgcagcctcgaacccctgggttcaatcgatcttcccccttcagcctcgcaagtagctgggattacaggtgtgtgccactacacctggctaatttttgttttttgggattttttgtttttgttttttgttttggtagaaatggtctcaaactcctgtactctatcagtctgcctgcttcagcctctcaaagtgctgggattacagccaccatgcccggcctaaatgatacttttttttttttttttgagaaagagtcttggtctgttgcccaggctggagtgcaatggcgtgatctcggctcactgcagcctccacctcctggattcacccgattctcttgccacagcctccacacagcaccaccacaccgtctaatttttgtatttttagtagagatggggttccaccatgttggccaggctgatctcaaactcctgacctcaggtgatctgcctgcctcggcctcgcaacgtgctgggattacaggcatgaactaccgtgcctggccctaaacaatacttttaataacataagcccatcacccaaaacacaaactaagaacttgacgataatctatggctccccccttctctatgtccccacctctcttacccaaggtaaccatcttctcaattctctgttcattcttttgcttttctttttacatatttctcttgtttctacatggtatttcccaaagcatgtgttttcatttagttgtttttaactttaaaaggtaccatcttgtatataaattttgtgacttacttttggaattaatatgataatgctgagactctttcatattgttacatctcaacattgttcactcaatgtagtgttccactgggcgaaaatacaagctagctatcttgtatcttgtagctcctgttcaagggtgtttgagtgtttctaggatcttgatatcatgaacggtgctggcacagcattcctgcatgtctctccttttgcacatgtgcaagatttcatcttgggtatatacacataggagtggagttgctgtgaatattcaactttaggagataatttcaagctgtttttctaatgtggtgagcctctccaacaacgcataagaaattctgtggatccatatcctctccaacacttagtgttattagactattagtatttattaatcaaataggtacaaagtagtctctcattatggtcttgattgtatttccttgatcaccattgatgttactcttcttttaatatggccatatttatttactcttctgtgaaatgcctatttatgtcccttgcctattttttcattgtattgcttatgttcttattgatatgcagtccaacttttttttagttggagtcttgctctgtcacccaggctggtgtgcaatggcacaatctcggctcacgcaacctctgcctcaagcgattctcctgcctcggcctcccaagtagctgggactacaggcgtgtgccaccacacctggctaatttttgtattttttagtagaaacggggtttaaccatgttggccaggctggtctcgaacttctgacctcaggtgatccacctgccttggcctcccaaagtgctgggattacagactgggattataggcatgagccaccacagccagtcccagtgtatttttgatattaatccttgtcagttgcatgtgttgcaaatatcttgtgacttgtctctactttctgagttgtcttttgataaatataaagttcttaattttaatatagtcaaatgtgttaatctttttctttatagtcactgatgtttgtttaaggaaatctattcttaccccgaggtctaaatgatatttagctatattttctactaagaagtttaaagttgtgtttttaacatttaagtctttaatccatctggactagatttgtcaacatcgtgtgaagagaagatacaatttcttcttttcccagatggctaatcatttttcaacttcacttcttcaatagtaaattttgtttgtttttcccctactgatctgacatataacttttgtcacataccaaatgccataaaccttaatgtgaggttccctttctagactatctctctgattgatttctttttccctgcactaatatgacactgtcttagttactataggttcatgctaagtcctaaacaaggtgaggaaaggctttcctccctccttttcatcttcagaagcatcctgcttattcttgcctgcttgctccatatcatttaacaagtttctttaaaaatctctgttgggactttgaaataatattgaatcaatagatccgtctggggagaattgatatctatataatgttcaactttcctatccatgaatatggtaaatttttccatttaggatttctccgagaactctcagataaaattatataattttctctgtagagattatgaacacagtttgttagattcctttttttttttttttttttttttttttttttttttttgagacagagtcttgctctgttgcccaggctggagtcatctcggctcactgcaagctccacctcccaggttcaagcgattctcctgcatcagcctcccaagtagctgggattacaggcacgcaccaccacacctggctaatttttgtatttttacggggtttcaccatattggccaggctggcctcaaactcccgacctcgtgatctgcccacctcagcctcccaaagtgctgggattacaggcatgaggtttgttagattcttttgtaagtacttgatattatctgttgatgtggatctcattgccaggtagctcttctagctgcttctgtttattctccttttctcttagcagagtattggaatgaggctgttgagagctgggctgaaggaatgttttgggaatggatggtctggcccatttgctgttgcctgagcaagctggtgaggatctctgctctgggctcatttgggaggagagcctctccttttctctggggaagtgtcgtgggtgccctgggtgaagcagggaggaactggtgaagggagaaacacccagctaggagacactttgtagggaggaggtaggggctcccaagattcatgcttgagtactggccctgcagtctaccagctgaagacttcaaaaaaagacttaacctctttgtcctctattagcaaaggcgctcaaaggtgaggttcacaggaggagatttctgcacagagtttagaacaatatgagggattttctttttatttccttaccagctgagattggtgagccattcacattgacagaatgctcatgacaaatgaacaaccacagaggcaaagccaggctaaaaatcgtcacaaaacagaacagatgttcccaccctctgaagacagagttgtagtttcataggcctcaagatggaaagattcatccggggagcataaactaaggggacactgagcagtgccgcttctggggctttgagaaactgagtactacttgttcccttctatggcagaatgctaaggagaggagccgtcattgcaatgtgaatagaggcaactgggaattgcattaaagggacttcaaggatctcccagcttcattctgcggacagccaatgtagaaccctgcctcagtcccaatctatgtaacattcatctctaaccctttcttggcctcgtggtagctttcctccaatactccaattggggcctttgccatgatgacatcaggatattttttaagttccccttggattgcatcgaggcttctctatgttgcttgagaggggctgcccatcttgcaaactttaaagcacagtgaaaacaaccttccacaagctcccggaaactccctgatgcctttctctgaggtaaaggtctttagatggtacctagttttgtgttagaagctttcacaccaagcagccaaaaaggctccatcctcacctgatttgtggtccccagaaaggagcctgcattaggccgataagtcatcatccagagaggtgatgacagtcgtctccatgaccattgattaatgaaaacagggctagttggacccagagtagatggttataaatggtgctgtcagagaaaaataattattgtattaataaggaaacagtccaaaaccaggctctaaaaaaagagaactggcaacttagcatctccatggatttctgaggcagacttgacggaatagtggggaggttgggggaaggtattctagctcccccaccacccgcctctccagaaggcagcccctccttgcctgtgcacgtgcccacgtccacgcgtggatgcgcggtgggtgcgctcgacctgacccagctctcccgggatgcggcagatgagccggggttgcgtggaggctttcggtaccacttccagcaggaacggagaaaaacgagcatatcttattgtacctgaaacactctatgatatgtactaaatattatgactactcggggccttgcaataattgattcacccacacagccatttagtctgcgagctgttcgttttacaaattctacaatcttttagaaattctttcagtgcggaagattgctgcctggcctcagattcattatggtgattgaatcctcttcaatagagaacggtttaaagagagcacaggccccgtgcgtctcactcagagttaaggcgcataggttaaaagcttgtctggtggcataattcactgccgctatgccaaacaatcacgtcttattgtgaccttcataagatacaaaaaggcaacaggatagagcttggcttttttttaaacccactcacagatttagcttcccaacatctgaagcttggagaattcctaattaaataaccaattaataatgtagaatagaaaaagctattttttttctgaaatgcaaaatcataattaatcagagtacaaaaagctgcctgtctttatatcagaaaaatatagactaggtatttaaatattccaccacacctgaaccctggccatccgtcattgctatgacttaaaacatctcagactaaattaggttttgtttgtatagagcagtgaaagtcagatggcttgaatgacaaaattagaacatgctcaaatcactgagacaaaaccgcataaagagaaagatgtgcaggaaaagggctgccagtatgaagcagaaatcttccactgatttttttttttgaaaaaaaaaaaaaaaaagcgttctttcctatttacccaaccacttggtgtaagtataaatttttgacccccaggcagacattccaggaaaagaaaaattatccccacccccttgtcaattgcccaaaatagcatgcacagctctaaacaagtaccctccccatcacgtcccccaccccagtttctccaccccgggttggccctggccctggtgtctacaccctcagcagacccgcccaccgctccagcccacgcccagcccccgcccactgatactgtcagtaacaccagacaccagccgctaaggttctccccccacccacccgggcactccgcaccacctccaagcgcatttatagttggaaagaaaagctcatttttataggtggtgccacctccacaatttatactttgcccatgaaataccaaaaccagggagtcaattttccaaggaagaaattttataaaaacacttttattgatggaagagatctgcagagacggtcgccatctgcaaggaagcgaaggctcttgcaggtgcgggttgatccagggctgcccaagcgtccctcactcaggaccacgcgcccaggcactaagcatgttatttctgtgtcttccgaacatgctaagcatttccttaccctccggcttttgctcctgccgtttcttcctcgtggaagtgaatatttgaaacctacctggtcttcccaaggtggcccagttattactgtgtgacgacttcttcctggcttccctggtgaaaagctgttccgtcctgcctgcaggtccctgtgttactttgctgatcacattctccctcgtgtctgtgggtgtggactctacccatgacttccctgtcacctgggggccggtgccctgagcccaagccagccctgcatcggggctgggcacagggtgtactcaggcgatggtggggccacagtgcaggtttagaggggccctctctccacccacgatgccaccagcctctgtcccaccctacgccacaaatctccttcaatatataatttgctgttatcatagcaataaataatttttggtgacgtttttactgttgagactttgtgcggtgtttttttattgacaaaaccgctatgaatcaacatgaacacaataaaaacgtgagagctatctgcattacggctgaggttttgtcaatagggcagtgcattgatctccgttcctctttggggttatttgtggagcttcagcgggtgggtttaggagctacagtgctcaggaggtgcagccccgggcctggcgtttcctgccacactcccctgggcactgcctccctgaagatggcacagccacagagaaatctcagccttgcggggcaaagggaagaagacagggagctgggagagagtgtgctcacctatcttccttccttccctcccttccttccttccttccctccctctttcctcacctctcccttcctcctcctttccttccctccctcatcaaccaaagcaaccagtccattgcctggcgcatcaggagctgtgtcctgggggcctggggatcagccctcgccagctctcagggtgctcccatctggaggaggcacagacctgcagacaatgggtcctcctgatgggcaccgtgtcccagggggtatgggggtcagccctggccagctcacagggtgctcccatctggaggaggcacagacctgctgacagtggccccttctgatgggtgctgtgtcctgggggaatggggatcagccctggccagcttgcagggtgctcccatctggaggaggcacagacctgcggacagcggcccctcctgaaggggggtgctcaggcactcaccgccaccattgaccgagtgcctcctgcacaccagacttgggctggggtctggctgtgactgcggtccctgctgtcagagcagggcatggagggcaggcgacgttaaaaacataatcacccataaaagcctgttgctccccagagtggtgaggtatctaagggatgccccggggtgctcttagtagaaagcggggggtctgccctggtcgggagtgggaaggctcctagatgtggtgtctgtaccaggctcacaggagcctggagtgctcctggcaggcacagcacctggaacaagcccagtgccttcggggagctgcgaggggggcctctggctggagcaggtcagggcaggcgaggaacagggagccaattgtggtcaagagggtggggggtgaggctgggacggtttctaaaggggctggggccctgagtttttccgggcagcaggagccaatgtgacagggctccatccctctgctatccccacctagccacccccttgctgccaccatgggcctatcctctccgggatcccttcagaccatccctgcccagacccagccctgggttaccctccccgccaccctccaggtgggagaccaggcctgtacaccctccagggcacacgtctgctccccactctccccccagggcctcgcaggggagcctgcccagcctcacctgcccacaggcgggaagcacaggggactgtccccccatcacaccatccctgcactggggttgcctcttgcttacagcccccatccaaatcctaccctctatggaggcccaacagaaccaccctcctccaggcagccttcctggattgtgctgccttcagggcagggccaggaaagccaagactctagggagggagaaggggcctgtcgccagtggtgtggtccccaacctgcccaaggccatcagatccacctccctccctccctccctctctgtcatttttagggactgggcttgccacactaatgatgtctgggggctgctggttcatgtccccagtttagtgaggaaaacagaccctgacccaggcctgggggtccaagcgaggggccagcaagggcagggtagagcgtggtgtccccacagacccggggtccctccggagttcagcaggctgtggagtcgctggccagccagccatgaatccctgcacagtgcctgtgcaagtcacccacttgcctgccctgtcacgatgctccatgaggccgggtccgctttttctgggagttatcactgtccagcttggtggtttactcgtcctaggtctgtctcctccaaccagaccttaagctgctgggagcagcaggagcagggatgtcctcctggaaggacatgggcacaacggacaatctcatcaggagagaggggacttgcagtggcacctgcatggaaatcaaaagagcaccagctgtgtgctgcagaggagggggtccctccaacctgctccacttcccaccccccatcctgtctgtccagcttggcactgtcttgcagcacctagagacgcaccggcccaggatcagccaccaagcacagagtagcactcactgaagatccaggcactttttggggcacacatcaagccaccccaggtgggggtcttcctacttcacccgcaagggtaaggcctgccctgctgagggtagtcacccttccccagtcccccgggagctggctaggaaagcagggtttccctttaagggtgatgcctgcagcagccactgtggcctgcctggcccagcccccaccccgtggcacctgcccacgcggcacctgcccagggcggcccactgtgctcccggcagccctcctgacgtcaacggcagccgcggggacgctgcctcctctgccacacgttgctcacaaagtgtaggcaaaaggcaggcgtccaattgctgcggatgaggaagagaaataatttcgtttctaaatcaggactcagtaccggtggccaggccccggaaggggcatctgtcggctgcacggcagccactcctgcaatggaggagatggtccagttctccatggggacttggggggctccccagctctggccctgggtgccgaaagccctgagaacaagccatctgaaaattaggattctgcgtcgcctgtcaatccccagaagcccacagcctttcattaagatccgcctgacatttctgttatgctcagaaatcccgaagacatgccaagtgcctgctatttgccatcacatccgcctgggaagccacggggccgccaagcccattgtgctgaagtgccccccaggaggggggatggcaggacacgcaggccctggcaggggcagagggcggcctgccccaggggcagctgacagagagcccaacctggggggccctgggccttgggttcatgccctccagggggccgtgggcagcttctcctcactcacattccacgagggcgtctgtgtccacagaagctcctgcaaaaccaatcaggagctgtgacatccctcaagcttgcatggaacccttctgtgtgccagtgctgtgtgtgccccggggcaccaaggcctggtttttggactctggggcctcacgtctaggaagggaggtggatgtggaacaggaaatgggtgagagaaaagtccaggtgtggggggaggaggcaggcaggctctgttggatcaggggctttgtggatattgaccattgacccgggcgtctcagagggaggacctgtcatttggccagcatgccaggagtaaatgtgcctgaaaggtcacagagatcatagaatgtgtgctatggaaatgcagcctctccaggaaggttggggcaagcctcgggaagggagggaaggaccacattgtagagttaggtgatgtggtcacatcttagctctgcaaccaggtaccacggggcagtgtaggacaaaccacgcctctgtagcgaagtgcatggccgtccccagaaaagcatggggtagcaggaggtatgtggagggaggagggccatgcagaggctgaggaggccagtccagcattgctatgggactggctgtaacactttggattgaaaaaacctgtggtcattcaggaatgcccataggacatgagtgagactggccctgaggcctgtatggttccaggagtctgactgcaagtgacataaacccaggtttctgcctccaccaaaaagcagaatgtattggttcatgtaccatgttgccttcaggcatggctggatccaggctcctaaagagtgcaattaaggttctgcttttcttgaacagtcttagctctgccttcctctgtgttggctttattctcaccagcaactaccagcagcagctcctatcatcttagcaacccaaggacaattgctcctataaaagtcacaggtaaggctttgttggctgggctccgggcatgtgcctttctctgagccaatcactggccagggcgatgtggtgctctgattggttaatcctgggtcatgtaaccatcccacagagagtgagctgttgcctgaagaagaggcatgatgtgggactgggggatggggagggaggcagagacaatagaagtcactgtggcttccccaaagcaggtcacacattcatcgtgcccttgagcttccacacttgtcctagaaaccttgctccttctagggtcttctagcctcatgcagccaatcccagtgaagccataagcatcacataccctgtccccaagccaggctgagcctggggaatctggatgaaagggcaggtggagcccgagcatcagctcctcaccccggtgcaggagctggtgagcccaggacaaggaagaaactgaggtgaggctatgcagccatgctggctaatgcctgcagtgatcaggataggcttcctggtggaggtggaagctggagacagaacatgagaggtggacagaatatggcagacagtcccattttcaaccttccccaggagagtctcttgcacaacctggaaagtgattgggctcagaccttcacctggaacccaggtgcagccatggggctgaggtgagacagtgagaagcaagtgcagaggccctggagcttggagtggggtcccggccagctgtccctccaagggcgattgtgggtgctgctcacagggctctgtgtacccatggggtggtgggccctgcatggcgccctcagagctcactccacaggaccagccatgaggccatactttgccttgcccacctgctgtttggagaagctcgtggtactgccttggggcgaccaaacccccacttcctgtgacacagcagctgagggacctcaggtggcttaaacagtcaggcttgatgagactgagtaactacctcctgccaggccctgggagaagagagaccttctaggaaacctcccccaaccctggccaccttccatctcccttaccaccccggccacctgggagcttccagtcatgtgcatgagatcaggagctgtgtgaagcaaagggggatgggaatcacacctggtctagccttgcagggtgtggggcctggagctggggaagggagaaaggtctctggagactatgccttgtcaccacaacccctgcactctgccagagagtctattcctggaaatgaaatttcaaatctgcactcttaggcttcccatttctcgagcacccctggctcaaggcacagggatcccatggagcagtggttcctgcccctggcctcacctttggcaaggagagaagatggcaacaagcccaccaccatctgagagcatgcagagctccgggtagggagaggcccaggaagctttctgagaagggacacacatacagtattagtgatcccagtgtgtgggagggtggggaacaggttacgaaagtgtgttgtgggcagtggcaacagactcagtcaggctgggcagagggatcctggagggcagtcaggggaaggcaagacacagaggcagggcttgactgggaaggcctggcatgccagacgaagctaccaacttcattccgtagctcgcacagcaggagaatgaaaagataaagcaagtctccagaaaaggaatctggccaagctcactgacccctgccatccattcacttatctatctctccattaacccattgatctacgtatctatccatccatccatccatccatccatccatccatccatccatctatccatccatccctccattcacccatccacttacctgtccatccttccacccatctatgcacccaccctatgcatccatgcacccatctatctatccattcatccatccatccctccatccatccctccattcacccacccatctacctattcatccatccacccacccatccatctacctatccatccatccatccacccatctatccctccattcacccatccatctacccatccatccatccatccatccatccatctatccatccctccattcacccatccatctacgtatccgtctatccacccacccatccatctacctgtccatccttccacccactcatctatccctccattcacctatccatctacctattcatccatccatccacccatctatatatccattcatctatccatccacccatctatccatccattcatccatctatccacccatctgtccatccatccatccatccatccctccattcacccacccatctacctattcatccatccacccacccatccatctacctatccatccatccatccatccatccacccatctatccctccattcacccatccatctacctatccatctattcacccatttaactatttattcattcacccatctatccacccatcctttcatctctgcatctcttcctccatccatcatccatctatccatctcatcctttctctattctctccctcacctctctccctttattcacctatctattaatccatctacccatccctccctctctccatccatccatccactcatctattactccatccatttatctatccacccatttttccatctatccattcatccatctacccatctatctatccattaatcccccatccatttatcacccatccacacattcatccatccactcacacacccattcatccatctacctacccatctatcctttcatctctgcttccatctgtccatccatccatccatccatccatccatccatccatccatccatttgtccattcatccatccacccatccattaatctatttatccatcccttcattcctgcttcccttcctccatttatccatccacccttccaccactgatctacccattcattcctcaatccatccacccatcccaagagttcactcactggcatgtgaccttttgaaggtcttagtcaatggggtctggggcctgaggacagcagactttggcctctgagcatggttttcacttttgttaccaccctccagccaggagactgggcacgtggaaagccaaggactgtgctgtgtggcagacaaacctctcccctcaccagctgccaggcaagggtggcactcatacctcagctggatgatgcaagaggaaaagctggaaacaggaccctaatcctgaccaggctgggtgggcagggtagggggcctgtgttccctgtcagttcaccctgaccacagaagacgacatattctcatggctgtgcccaaatggagtgagtgtcctgagacaggacagttggaggacagaggatcacttctcccctccctccctttgagagttattagacaactcccctgtgccagaccctggtaatacagtggtaggcaaataagactggccctgtccctgggagcttgtagctcagagagggagataaacagcagtcaataatcacccacctttagttctgccctgcaccaggcctgctcatgggcagacactcagggaaggaatgaaggaaggaatgatgcctgcccagcaggatcagtggcatgtggcagcctctccatgtgttatccactctgtgtattatgggttgaattacgtcctcttcaaactcataagctgaagtcccaaagcccggtacctcagatgtgacctcacttggaaataggatcatgcagatgtaattagttaaggtgaagtcattctagcgacaggtggcatccgagacacatgcacttcatctttgagggcaggggcaggcctagcaccccacctttaaggacagggaacaggctcagcaccccacctttgaggacagggaatggacccagcatcccaactttgagggcagggatgggcccagcaccccaactttcagggtaggaggtggaccaccttatctttgagggcaggggatgtgccccacctttgagggcagggatgggcccagcaccctatctttgagggcagggctaggcccagcaccccaattttgaggccagcacagggcgcctcctcagctaaggggccctcgccggccccctcctcccagcttggcctcagagctgcaggaaaagcctgcccgggccttgtttatttttggagagttttaactggttgggcgaggaagtgagccttgttaaaagggatttaactgtgggtcaccgcgagtttgaggggcttaggaggaaagaaagaaagggcttttcccttcatcttctccggagcaggggccccttcctcacaaaggcccggccggagcggggacctcagtgccagcccagctggagggagcgttaatggggagagcttaagtcactttgggaacaggaaaggtttctcagcggcaggaaagaaaggcctcccagagccagaggaccgaggggctggacgggaggatctcctgggggcttctttcactggcccctcgagggagggcttgccctctgctctctgaaacctggagacagctcggggctctacagcacactcaagatccacccaccaccccaaatgaaccccaggaacgcggcctcaaggcccagggggctgcagacacaccactgggtctttgctcccagggagccctgtccaggggacgggaaaatgacccacagcccggcctgggacctgctgttcagggtcctggagatgccgcaccacacccctgcccctgccactccctctgtgactgaggatgggtccgtttctctggctgaacctcctctgtgtggggtcctggggtgctgccactcctcaccgagggaggagaggcgtcttccgcgtgccccgaggtccaccttcttggtcattgtcggcggccctgttggtagcttctccatcacgccgcacaagcggctgagtcccaagatgaccttttaccagagcgggtagagttcacagaatcggatcccatcctggcctagcagagcgttttattattatgggaaacagcagaagtgggttggaggggggtccatcatctcctgcaaccagataaaatagaaacaactaaataaagcacccttgccgctcaagggaaaaattatgcttgtcaattatgatttatgagcgattgccaagcggggaatggggcctgcccgccttggaggccactctctgcctccccccagcttggtgggtgaggctgggggtggcgaggctgtgctgggagaaggtgggtcctcctgcagctctgactgttaaccccttgttgcctgcaaggtcagtgcccggctgctagaggggagggaggggatctcgtgcccccgatctggcaccggggtgggcagggcatatggacggcagccattggcgaggtgcccacaccaggccctggcttcgggcccagcatgagcctgggccggcggtgggtaagctctctatccctctctgccctataaaaatccctggcagagcctccagtccatgcccgcaccgcctccgcgtcctcccgggctccccgtggaggggcaccaatttgtcctcgcctgcgcctgctcgggccagatggtgggtatttccaggccacaaagtcctctgacctttgaacagttgccgccgaatttcaataatgaaagggccttttttgaatatgtacaaatgagacgttatatttccatacattttatttccagcctcatctgcgaatctaatattgacccggagttatctgtgatggggaagttattaattctgacagatataagggagaagctaatattcgccttttacaaacacctaatattaatctcaggcgctgtaaacgagtcccgcacgccggcatgggggagatgacaccagctcggaatttgataatgaaaaacggggaagtttaatttcagggaatggataaaaatgtttgcccgctgagaggtgagcagcgccaaaagctctgggagggcgggattcccggaggacagggtggaggtctgggaggtgacctccatccgaaggtctgcgatttggggcatgggcccaggtgccggagagggaactgaggttggagccctccatccctgcggccctcactgttcgcacctttaggagctgcctctggacaggtctctgcccattgttttgttcagagctcagccaaggacttcttacactttttgtttgtttgtttgtttaacattccatggtcctgtctgctcttttttgcctcctccgcctcattcggcttctgggtcaggcatctgttgtaggctgccgtactgccacaggttgaatcatgtcccccaagcttagatattgaaatcttaatgcccagtgcctccggtcgtgacctcatttggaaataggatcattgcagagggaatttgttaagatgaggtcaccctggagtagggtgggctcctaaccgggtaagatggtgttcttatagaaaggggaaagttgaggccgggcgtggtggctcacgcctgtaatcccagcactttgggaggccgaggcgggcggatcacgaggtcaggagatcgagaccatcccggctaaaacggtgaaaccccgtctctactaaaaatacaaaaaattagccgggcgtagtggcgggcgcctgtagtcccagctacttgggaggctgaggcaggagaatggcgtgaacccgggaggcggagcttgcagtgagccgagatcccgccactgcactgcagcctgggcgacagagcgagactccgtctcaaaaaaaaaaaaaaaaaagaaaggggaaagttgagctgagcatggtgactcacacctgtaatcccagcattttggaggctgaggcaggaagatcacttaagcccaggtgtttaagaccagcctgggcaacacagggagaccccatctctacaaaaaataaaaaaaattaactgggcatggtggcacaaacctgcagtcccagctattcgggaggctgagatgggaggattgcttgagcccaggagttggaggcttgaagtgagctatgaatatgcccctgcattccaggactggagacagcacagttttgttgtttaaacctcccagtctgtggtactttggtacacaagcacccaagcaggccgatacacccacgtctccttcatagcgcttgacaccacagcaattatgcactgagctgaatgagttttgtaaactccacgagggaagggacaatgtctgcagttgcctgtgcactctgccatatcccagcaccaggcacggtgcctggtgtatcctagatgcccaaagagtggctgctggatccatggctgagtaccttgctatctccagccagaaatacatccgtaagcactcactggtggatccctcttgtatgcccaggactgtgccaagggctggctgtgtatgtggggcacacccaaacaacctgcctcagcacgtcttgatggaatattatttttatttcctgcagaccgtgggtgctaggagttgggtgagatgggggctttgccaggggttgggaaattcagaatggaaccctgaaggtagccctcaccttggcaagaggggtggtcgtggaagacctgggacaatggaaagctggggttgctgctgggggcaggcagggccttgtggcccctagcagcactgactggctgtcatcatcacaaaggatccttacactgtctggctgagcagggcatggagccgcagctccggggacaccgcagggtatcacaaaggatggttcctgtctctcccgaaacacaggtgcacttggcgctccctgctggagggggcttcatggtggaatagacttggtgcccttagatcaccagctgccagaactggggaggacttcagtgatcatggagttcatcccgcggccaagttgtcaagtgaggaaacagaggcccagagaggggtagcaacttttccaaggccacactgcagctcaggttcagagcatggggaggaccctgccccggccctggacttaggggtcagatgcttttccaggaagcagggattgaggaagcactggcattgataggcaactcaagatttttcctttcttttcccctcatttcccctccatgaaaacctgagtcttcagcatttgatgggaccccaggagctggtggctcttctgcttccccacgctgctccttctcgcttgctcctctgtctggccaccctggtcctcacactaacccatattcaagccctcgcagccacacgcagtgatccttggggtgcccacactcaaccaggccatatacaaagtgcatctttgtgctatgcttgtgtgtccacagggccacacacaggacacaccccacacacaggcacctcaggcatagcgtgaacacgcacaaccccgcacacacacacacacacacacagcccccccccttcacccctcaccattcccaccccaggcagttccctgcctctcctcagcacagtgggaacaagggatgctgactctagatgagctctagggaaggggttccctaggaatagaccactgcagaccagcttctcaaaatcatgacatgagccagacccacaaacccacatttcaagcagagcctgaggactaaggcttggaggctgggaaaaccaagtgctgtggtctccttcctcctccagtctctcctggtcacgtggatgcctggcctgtggacacgccatccactcccatcctttcccatcccctgcatggctcatgatcaaggtgacggggggaagacagctgtccctctgcaacttctgcaaactgcaagccaggcctcctccactcctagcctctggcattcctggaaaactgggctctcagcaggaacttccaacaggttctaccccagagagctggccccgactccacctggatccaagcccaccggctggctaatgggctgggagcaggtcctgccctgccccgggaacggtcactgtggttccatctatcccagggcggtttcccccctggagcccttctccagcaggagagcactgaatggcgagccactggcccctcgcccgaccttcgtgagccaaggctgagtttattgtcagaaagatgactaagaaatccccgacacagtgtatcatcagcattatgattggagaaacaacacctacaaaatctatgattcattaagtgtaaccaatatataatttaaaacagtgggttttgtcaaataatgtgaggtcagcataattttctgcctattactaatatctataacatctttgccttagtcagctctatttaaatatgcaatcatttacagcttttgagaatatttctgtgtactcccaatttccaatattcaactacgacaaattttatgctgacatcaatagcaaactattaaagacagtatttcattattggtttttcatcccaaaagttatttacaattatatactaagcactaatattaaaggaaaccatttaaatgaggtgctatctactttaacaatatgtctgtcacagaatgagattgtgtttaaagattttatcaagaaatggttgtttgctgaggttatgttttgtccatgaaatatgcatttcatatctctttcatttcattaacataatttaatttgtgctttgcattttgtgcataatacatatttgatttacaaaacaaatatttccattagaaaatgaatttcatgcaggcaaaaaagcagaaccaaatgatgtattgaaggaaaataagaagaaatgaaatgcattttctcagtctattaaaaaatctatggcattgacagaaagtgcacttagtgttacgtttaaaaaatagcacatatgtcaatgtattaacaaatagaattggaaatacaaatatttccctatatcaagccaagaatctctttattttaattgagttgatttaaaagcccaactacaatttaatttttatttcatgatgtggtgctggggctggtgctgttggaactgcgtggggttggcggttgatggaagaagatagttgaccttaaaaatggcttttattgacaatggagagacatggttgaataggaaggaaacgggaagcggggcctttgtgatctggggggctgggagtggtgagcggggctggcgggctcctgagccgctcctggcttggctgttcctctgccaacccctccccagcccctctcatccccacctggggctgctgggctgtttggggacccaggaagtgaggaacgtgagtctcccttagcccacgcccgtgatgggggctctggagttagaggaatgtaggagctcagggctcaggatccactaggaccttgctccccctcccagcccacaggggagccccctccaggccaggagcgggctgtgtatgctgggggcaagtgcatctcaaccttatttaaaggggatgtgtggggctgacagtggttatgtcaacaatggaagaagtggctgagatgcccaggtcggtcactgacacagggcaccgggcaggacccccaacccactggcccaggcctgcctctcccacccctcactgtccccaccctaggcagtcccctgcctctcttcagcccagtgggaacaagggatgctgactctaggtgagctctagggaagggggccctaggaataaaccactgcagaccagcttctcaaaatcagatgaggaaactgagccccagggcatgatgttgcacagtgggtctgtggccaatccgtctacactggctaccgtgactctgctcctattccctaatctgaaagctctttcctgtaccccgctaatccacacccagcctaccctgggcccccacagaataaggaagtagcccttggcctgccagcccctgggacccacgaaaccgggtgggaggctctcacctgccggctcagcctgtcgggaagatcccagtggcctctttgttggggagggctcctcagggcgcctgagagcctctactttatgtatgcagagggcagtggtgagcatgcggatctcagtgtggctgaggtgtacagttgcacaggctgtgcactgaaccacagtaggagtgtctttcacatggatgaacacgagaagggctcccccaggaattgtgcagtgcagtagctctggctctgcaccagggctctcaaccagaaggtaacatcacaccatcctcagtcatgggacatcacaggcagggatggggctgctgccacactctcatacacatttacacatgctcagacacactctgacatactcacaactcacactctcacacatgcacactcctacccacccacatgcacacacactcatccatgctcaccaccctttcacaacctctggaggccctgagggccagcctgcccacctgtgcccaacctggcttgtgctctccccatcggaacggggctcccctgaggctgggccatccctccctgacagtctccctagaacctccaggccagaggagcctgggccaccgtgcatgtgggcgatgttcacaggccttttggccacaggtgccaggccaggggctgagggggacaaggagggcttcccccagtatctggatgggatctgtggactgggggtgtgtgctggccagccctgggatgccctggttcctgcttaaaaccttgccccacttctccagcctctgcccctcccatggcctctctgccacccagggccagaggagaacgtggtttgtaattagaaaaatctcttttctttcaatcccaaggactgcaaaaaatagagagggaggaaagcagcagagaaaccaagaagctgaatttccactcaggagaggcatgaaggggagtaaagagggttggggcaaggcctcccatctggggccgggatgcctggctctcctggtgcctgtcttgagacactgtgtgtcaggagctcctggacagcagcagatagctctctgattgcccaccatagtgggcacccagccccagcctgggctcctagctgcactgcctggggctgatggggaaccagagagccctctcggcctcgcacatctctgttacaccacggggctgctgaggccactgatcctggaggggcatcacagagggtgagccccgcccattcagatcctgtcccaatgcccacctgtggtaacaccttcctttctctcaacctggcctttctcacccacaaggtgggaatggtgatttccacctctcgggagaagagagaatgggtaagaactggctcactggggactggccatgggctgtgcgtgaagggagctgccgggacagagcgggaggtcctggctccccggagtacctggccagcattcccttggccaggaggaggctgggaatgtgctgatacaggaaagcagcctgctttctgcctggtatattggaaagaaatccatctctcggggaggacaacctcatcatattagaggtatagatttctggcttcagctgggacagaagtcctccttcccgagagggaagggcagtcttccctaccttttacagctccttcagagaccctggggctgcaggggccagcgtctctgggaagggctcaccaaggtaaggtggtcaggacccagtgagcctttcccagagagggttcaaaagaatgtctggggccaagttcaggtctggggccatgtccatccctgaggaatctgggagctgtctcctccccagccaggtgccatctcctatggccccgacccagccacacatgagacaaggcatcccatgctgatgtggacagttagtgtgtgtcacatgacaacacgtgtctgcctcacctgatgccaggcactgcagagactaaagcctgggaccccctccccaccaacagtgaagcacattccccaaagggaatttatcctggagctattttaacgacagttcgattgcaatactttcttttattatatatatttaatttgtatacaactaatataggtgcagaattttaaacagcatgtcacacatggagtgaaaaaaaaaagcagtctctgttttatcccttctcaccctgattctggctcccctgggggccactttccactctttgagctgttctaattgccctgggtttttttttgttattgtttttgctttttatttttgtaatgtaccattggtaatttatgccagatttctcaccagaacggtgaactcttatcatgattgttgacatattcggctgtgttctgtttctatttttttctcgaggatgtccttctgacagtgtttggatctgctaattgctcccaagaattggggttcagctgctctcccggtgtcttccttcagtctcagcctgcaaatcgcctttgccatctctgttccataagctacctcttgctctttcttggtttacacctttgttttggtggtgcacatcctccagtggctttggaaaaaaggagcttggaaaatggccttttaaagactttgcatatttgaaatgccatttgtccaccatccctcttgatcaacccattcaattggatctagaattctaggttgagattatattttgtcaatgttgaaggcattacttcatggctgtcttaattcctgggtagcttttgagaagcccaatgtcttctctcttttctagtcccagtcttttgactgtggcttgttttgtcctctgaagctttaagaccctttccttattcctgtcattctgaaatcctgcaaggatgggctctttctatctggagactcatgtcctgtaatcctccgatgcctccttgagtgatttccttcgaagtgctctacccagacttttctcagtcacatctttctgggactcttatgagtcctctatttgaacttctaactctgctatccactctctccttggatcttatctttcctctcctattttttatattttttctttctgttctactttgcaggggatttccttaagtttaatttccaaccactctattgatttatttttaaattctgtcctcctatttctactttttaaaacacttttttcattctttctttttctttttctttctttctttgtttttttttttttttttttttttgaaatggagtcttcttctgttgcccaggctggagtgcagtggcgccatctcggctcaccgcaatctccacctcccaggttcaagcgtttctcctgcctcagcctcctgagtagcggggactacaggtgtatgccgccataccaagctaatttttatatttttaatggagatggggttttaccatgttggccaggctggtcttgaactcttgacctcaggtcatctgcccaccttggcctcccaaagttctgggattataggcgtgagccactgtcacccagtctttttctttctttcttgtttattttagcaaatgttctttttgtcaatctcccattcctgtgtcatggaatcatgtcctttcttccctctctggggggttcatgatgactttgtgggtgtttcctcttgcccctgcattgcctgcaactctcacaagttgctcttttggcctctgcctcttgcattggaggctttcctcagacatagtggccgtcttggaatgaagggccagaggaattaaccagaaggtttgcagacagggctggctggctggggccttgtggtgggtgacggggaatgaatgcctccttccctgggaactgtcacatgtggcatccactagtctttcttttgggccagtcattttttgtcagtgagaagtccgctgatgtcctgtgggcacggaggtcagttctggggtcctgggggaagctggggctcaccattccctaagaagcatttctacatatcttgtttttgtcagggggtactgcctctgctcagcttcagagaaggaactccactttctgctaggctgatggccccctcttttggccacagagggctgggagattactggggtgactctggctctcagccagccctctggttttagctctgtctacaccccatgctcaaacgtacctgttgcctccagtccctgagtgtcccctgctgcagctgcatggctgctctcactcactcggttgctgctgctcatctgctttctatctgcctcagcctgttttttctgctttaacaaaatccccaagactgggtaatttataaacaacagagatctattttctcacagttctagaggctgggaagtccaacaccgaagcactggctgtggagggccaagtctctgcttccaggatggtgccttgttgctgcatccccctggagggaggaacgctctgtcctcacatggcagaggagcaaaacagcaaaaaggcctgagctagtgccctccagcccttctaaaaggcatggactcaccccaagggcagagccctaatgccctgatcacttcacaaaaggccccaccccccagcaccaccacaatgaaattaagcttcaacataggaattctggaggagacacattcaaaccattgcatcatctctccaactttttgtcaaaatccctttttgtgttgtctcccttcccattctctctgctttgtggacttgagccttttttattctcttactgtcagctgtgggatttgacatgaaaacagagaggtacttgcatggcgactcttccccttgtacccagaagaacacgactgctggatagctctgtgccagtcccttcctgtcctttggacccaggttgctcatgtgaggaagaggaaagtgttggggagatggcttctcaagtatggctggctctggtggtgtttctgggctcttctaaggtctccggaaaccttcatagactctgcagaatgaagcaccacagcttggtccagggcatctgcagattgagacggccctctcttcctcccagtcccagctgactccaccaggatccagcacccagcaatgaccacgcaaggagcccactggccccctccccagatgctggggcattccttctctcacactccggccaccagggtaggagtctcccagctaggaccctagactcctaaagcttcatgcccagcagagatgtgggtgtgacaaaacagggagtggtagagaccgtggctccaggcagctcatgttccctcaaaagacatgcatttcgaagctttcgtaacactaagctgtcttgtaattacctacgtaacactaagctgtcttgtaattacctacgtctgccagctgtatgctttgttttaaaatatagtatattagcaggaaatttaaggtgcaatacggccaatggatcaggagacaactgccccggacaaggtggttagttactcacagtccccaccaggagggggcatgccacacccccagggccacgtggggcagcaccaggatgggtcagaggcagaaggagagaggggaacgccaggccaggacctccattgtggtttccatgggcaggaatgggaaagggagggtaagcaagtctaggagggctagtctgtgtcatttcagcagctctggggcacagggactgtccctggttctctggtacttggccctggggtgatgagagcaggtggagagtggcctggaggacgagagccagcagaggaggtggtaggattgtgggctctggatcagttgggttgcatttgaaagtgccttgctggtggtgagctgtttaccttctctaagcactggctggctctggcaggggcagccccttctgggccagcaaggctccacatgtccaaacaacagaaatacagaaaataagagacgtaactcatgcgttcctccctcccggctgctggtgaggcaccgctgctgggcatcagggggctggagaaggtgcagacctggccatgccagaggccgtatgctgggggcttcctcttgggctgagggggttctgggctgtgtgggggaagagcaagttctgtttaggaaatcctaagtaaggactcaagagggaacaggctgcattgggtggtaaggggtttctgggtgagggctgtgagctggcttgcagaagaagcaggactttgagatgagtgtggctatatgaaggagacacccctaaagagaggggggatggtcaccaaaagctatgccataggacagccctggccactgaggggtggggcctgtggctgtgggaagttcttcctcttccacttctctgcccaccacccgtccctgccctctcctcctccttatctggggctgtcaacctgtggcccagttctgtgtgtcaattggcctctcggaagtacccagcagcccctgctcaaatcccctctccccttgtccggtgtgacctggcaggtgagtccctgccaaggccttagggtgatggggtactgtagaaagatgggtttgtgctcccctgttaatgctcctgctggctgggagaggctgggttaccaccccatggttcccagacgttggtgggtgagggagccggcgtggggcgttgcccaggggagggatctcctcaagtggttcctgatggcgggaaaataaaaatggtgatttagaggccgcccccactcgacgggctttcttagccgaagacgttcagctaatgaacctcaagcagattcatggccgggtgtgaagtcaacggagtcctcactccgtggagacgagcagcataaatctttgtttttaatgtctaatgatatgtaaaatatttaaatttgcaacgcagaattattaagctgccaaggttttttttgcctattaaagtgtattcttgcctgagaatttatggggcaccctgtggccgccgccagcccccgttaggggacaggaggtatagatttgtggtctcctactgtaaaaaacttcaggatcgcctgaccctgtaaactgaaaattcatgtctctcgcccggggacaaatgcattctttgtaaaggcggcccgtggccagccttgggctcatgttagtttattgtcactggttgataacgtttaatggaaaagatacaagagtgccaaagaattttaattatttttgtgataaagttatatgttcggccttgaaaaagtagagataatgcagggattcattattattcccagtgtgtttaaacagacaacgcagaatgcaaacaaaagcagatgaaatttgaaaagtattatcaatattgcagatagcagatgccctttcgaatcagaacaagcatatcttctatagcaactttatggttgagtagtttattcatttccattagaaggttgtacgtttctaaaatatgtagatggtatctagaaaaaccaaccaaccagacgggtcattctgcttgttttcctaaatttattatttcacttttgcaggcccggatctgaggggcattaacaggggagcagagtcttactgtgtcaaattctatcttgtccgtgacctttggcgggctatgtgctggcacggagaggaagttggagcgaggtgtctggaccatggcgaggtttgcgtttgccgttatctgggttgcattggcgaagctgccagtcagggtctgcctgcctgtcgttaaactttccacattccctgggctccctctggcacccgacggagggaaacagagtccaggagaaaactgcacacacccctcaccatccatttcttttccccgtgccctctgccctggattcagatgtgcagaggtgatttgggtcctgcctcaatgtgtagaaatggacctgacttcttcccagggctgtgggcttccttggcattgtgccaggggatagagttctggctttcttgagcagtcagggctttccaagttgtgccagtttttttttttcttttttttttttgagacggagtttcactcttgctgcccaggctggagtgcagtggcatgatctcagctcactgcaacctccgcctcctgggttcaagtgatcctcctacctcagcctcccgagtagctgggattacaggcatgcaccaccacgcccaggtaatttttgtatttttagtagagacggggtttcatcatgttgacaaggctggtcttgaactcctgacctcaggtgatccacctgcctcggcctcccaaagtgctgggattacaggcgtgagccaccatgcccagccgtgccagttgttttttgaggttaggagcagtccctagagaaccaactgatcccaaagccccaccaactcctcttggaacctgatcgccttcctatcttgatttttgtttctaggaaatggatcaattcttgccctcgtgttcactgaatgaagtaacttacagccccagctttgcagccagacagagccctgggcaagttaccctggcctcggagcccccacacctgacaccccacgtgttctcagctgtaacgtgggttgcagacacccgtgttgccaatgttattaccatgattgttgttttcttccactggcagatgcacaggaaatggctctctctgctgaactgagcacctctggggctccttcctggcctggggtttctttgagacaggcccaggagagtgacagccgggcctgagagggaaggacaggctgtgactcacaaaggtgcaggagtcctctccccgggttcaccgggagctgacgggctaggccgtgggaggccttgagaccaagctccgactttggagatgggccaggcttggctgggcgcctccagtggttttgaacagggggcgccatgagttaactggtgctttcagaaagctaaacctggcagcaagtggcttcttcagagaagggactcacccaacatcagaatgtttaccaaaatcaatcacgcggtgggccatagagaaagtctccttacactgcaaagaatctgtgtggttataccgtgtctgcgatcacagtgaaatacaactagatattaaaagcaaaagaatagctcagaaattctgtttggaagctaaatagcatgtttaaaatagaaacaataaaagaaatcagaaaaatcaaggatggcatgattttgaggatgctacatgcccaaatgtgtggcacacagagagagggaaatctatgcctttaaatctatttatcaggaaacaagaagggttgaaaacaaaccagctaggtgtttgctcctagaaactggaaaaagagctacagagcaaacctaaaggaacaagaaagatgacaggaataaggacaagggcaggcacaaataaatagagattagcaaaggtgcagacaggttttttggaaagattaacaacgacagagggagggccacgagatgatgctgtcaggagggcgtgcaggacacaggatgctttgggctgtaggtgtggggaaaaggcaaccaggtttttccatgcatctcacaggactggtttgcctgggacagccctggtttctgcctgttgtcctggctatcactcatggcatctcccatcccctcaaagggtcctgctttggaaggtaactgacaccagtgctgtccaataggaactgagacccttatgtaactactgagatgtgtggttggtgcaaattcacatcagattttgaagacttagtatgagaacaagaaagtaaaacatctcatacatacgtgtgtgtgtgtgtgtgtgcgtgtatgttttatttttatttttatttttttgagatggagtctcgctctgtcacgcaggctggagtgcaatggcacgatctcagctcactgcaacctcctactcccgggttcaaatgattctcctgcctcaccctcccgagtagctgggattacaggtgccaccaccacgcccagctaatttttgtatttttagtagagatggggttttgccatgttggccaggctggtctggaactcctgacctcaagtgatccaactgcctcggcctcccaaaatgctgggattacaggtgtgagccaccacacctggcctcattaatattttttatattgattacaagttcaataatattttagatctattgaattaagaattaatacatcactaaaattatttccacctggttctttgatgtgattactagaaaataaaacattacttctgtggcttgcattctacttttgtgttcagtgctgattgacacggtcaccccagccatgggcgggacgctgggatgggcctggttaaaggcaaaggcttcggttcagatgcagaccccagcactaacttgtcttagtcaaataataccaactccttacgtttcaattcccccttctctaaagtggcagtaggatgggtctcggtctcctaagatttggggaagttccacttaggtaactcgcgtaaagcactcagcgctgtgcggttggcattcattaagtattagttgccagtcataaaacagcataacgatgagatgcttttccccccacagccctgtgatgccactttattgcttaggaagtgatggtacatgaaatgttcagtggcttgcccatggcctcaagagagcaaagctggccttcccacctcaccacatgacactggggtaagatggacagcgggatctgttgcctgtgctcctgtgagccggctggcctggcagagggggcctctttgcttctaaccacccttccttccgccagctcatcctactcttccctagaagccatctctgcccaccagcccccactaatctcagcccatcctggcctcgagtgaggagaggatgttctcttggccttctctgcacactccgggttccccaagtttggaccttcgactttccccctctttctccccacttggtgcccccagcacgtagcatgaagtttggtcctccacaaagcttggctgggagcttgacaaatgttccttggtttgtcaaacaaactctccggcttgaactaagtgcctttctttcagatttcagaatggatgggcctcagccatggcaaatctgagagtctttgtgtgcagaaatgcccttggatgcccttgtctgtgcatggttgccagagctggtcaccccagccagacatgctggtctgggcacctcccgggaggagccccgggtgatggcacctgttttcatgaatgacacagcaatctccacttcagtaagggccgaccatactgttgattcctgccctgagacccttctcccctgccctggttctaagtgtagatccctggagatctgggactgaccagatgagactaagagggagcgtagacaaggagccacaggaggcgacactcccggtggtggattcctgcctaagttccagggaactcagaatctgggggccacgctggcaacatctgtctcttggcttcccaaagaaagactaacatgccagcaaagccaggaaatgtcaagaccgagagctcatgtggatgtagaacttcacagttgacaaaatactttatgctcttttatttaattttcacaaaatctctgctaaagagtggtgttattcccattgtatagcagaggaagcccagacaagcgaacttggccaagaactcacagggcttgaaagggacccgcctggtcccagggatggggtgtcaccagctcgggctgggcagcctgctgcctcgaagtctaccctgtgtaccctgttgggtgaagagcatcagggatgagaggagattcttgggaggcagtagaaagggtggcaagagcttgtgctcaggagttggataggagtttaaaccctggtgctccccgttgcgtggaaactaatgaggctgtggacaatctcttcgtctttgggggtttccattttctccttgggggtgttgctaacacacctcacctggctggtgtgagggtttggatgacgtaatgcataccagtgcccaggacagaggaagcaccctgtgaatggtggccactgttgttaccattgggccagagatgttggagaagtccctgagtccaatcaattacctgggaggttgaagccacatgccctgggagagggcaggtgaagtgctgttgacggaggcccggttccctcgaggctggggggcacctccagcttccgactcctcctgttctccaggttcctccaggaccagaccctgcagcccagtctgtcccactcttgcagggtctctgaacctgaaagcagcttgggaggggcgttctgttgcgaggcgtagagtgtttataagaggagcctggagaactggaggagtccgaggttggaagtgccaaccagcccccagggaaccgtactgccttggcagcatgtcactcactctctcccagggctgcatcgcttcacacttccagtcctctgtatgtcttctgtctcctgtctgtctgcaccaatacggtggctcgcccaagccccatgaccgtgcagggccggatcccaccactgttgcactgcttggccagctcagttccaacaggctgtcgtctggcttcctgggccctgcatccagccctgaattagccacgtgtcatgctacactcaggcctagccataatttggaaggggacaatggctagcttgacggggcggacacactgaactgggtcctaggatcagcttgcgcaccccgtggcgtgatcagaggagacttacgcctacacattttagggaccaagaagggaggtggccactttcatcatgcagctgtctccacagcctgcatcctcggaaaggagccacgatttccctgcctggctgctcccagccaccgtgggtgaagaccccagcggctttccgtggggaccagctgaagggactttctctgagtgccagcagagggaggtgcctctgttttctaagctctgcccttctttgaaaattgagctgcttaaaatcaacccatttgggacaagcggccttgactcttctcccatgatgtgcagggctaatgttaaaaggtaaaattgtgtgcgggttcccaggcaatcataattagagtaattgtcctgtgttgcaggcacccctctttcttggaagcttaaagcactctgtgagcattatccaattaaatctggaaatagccgggtgagagaggtggggacagaccatgcactgtttctggccagaaaacagcagccgtgagaggttaagtgacttgcccaaggtcccagagtcagaaactgagacctgttcagcgctcagtggattagcatccaaaaagcatttactccacagctgcagctcacacggcaggtaggaagacccagtttcatatgagcggcagaaattccccatccagctcccaggttgcagtttgctctgaaacccagcggtgtagcccccaccctgcccaccttagctgactactgggcctcctgccctcctcccagctcctgcagacctttgaaggtactgacgagcctaaataaaccttcctgtagataacaggtggtggtggccaagagaactaaccaaaccagatacattttatgggttgcagaacaaattaactatgaggaataactgtttttgagaaataacagagttataattgtttaagtagctctcttgctggtgtggttttatggctagcctctgctgaactatagacaccccaacccacggggcagatgggcagtgggacccccacaagtggctttgaccccaagttccatgacagaaatggactgtggacaccccaggtcatgctggggaaaccggtgggagagggtgaggccctgctggcgacccgtgagagccccagggtgtgctgggacacgggtgggagagggtgaggccctgctggtgtcctgtgagagccccagggggtgctgccatggacagcagctttgctggaaagtcttctccatgtctgggatgatgactggaaagacggagatgtgggaatctgtgaatgcttctggggatggcctccatgccagagtcccagagcaggagtgtccttagcaaatgttgtacccaaccaggagaagggacgggccaagccctgtaaggtgcatcaacatttacacactcatcacaacacaggagtgccaggctctggagaggttccagggagccaaaatgaaataacaaaaaccaaacaaagccccaggtccttgccctcctggggcttgttgtctcacgggggaagcagacatctatttttaagagccacacggatacatgtattatttatgtggtgaattccaggaggagtggggcccgggagatgtgtggataatggagctgggggcggggaccggcaggagctggggatgcaggagactccctaggaaagggcggttgaggaggacctggtgggtgtcaccaggtgacacctgtgaagtggcatatgtgtgtgtgcatgggtgtgcatgtgtgtgcatagaaaggaccggaaggaagctgtcccagatacagggaatagtaagtaatagtaaggctccccagtgggaaggaaccagagaatgcataaagggtaaggggtcttggtgctgcatgaaaaggaaccctatgttcaatataccttttttggggtgatgtaaatcatggaaattcaagtccatctaaactttccttatgggactgtacaagggagagcatggagaggcttaatgggggcaagtgtaggagagggttaaacccaaatggcacggcccttccggctggtccctggttactaagctgtgcctggattacagcacctggggccatggggcccccacccggagggctgcagagtgagggtccctggagcctgagtcctggctggaggcccagaggccaagggattacatgatgacataggggattggcacagaagaggtgcggccagcatgattacatcgtccgtccctcgcagcctcccaaagaccacggtccaccttgactgcgtctgctgccaaggatgaggccttttgagcatctgccccaggcctgtcccagacacagcgagtgagagggaaatcttcagagggctgtcagggccttgctgctggagtgtggccccaggaagtcattgggtgggctgtgggggccccaagtgtcctgtgacaatgtcgtctagggcctctgcaggtccttccaacagtgggtctgcactgccaagctcactcatttcggctccccccactggcccccggtgacacagggagatgggcaggtttgcctttcacagggttcattactttgttatcaatgcctcctgcccctgccccccacttcctgcttgctgcaaggtcccccatcttcaacagtgggtagtgggcctgctggcctctgaggctcagccccagctctgattgggaccagggctcagtgggctccttcctcagggggaggtctcaggctcctggtgaagccccctgagcttcaggaaggtaagtgcagccatttgaacagccctcattggccgccttcccattgtggagaattaggtggccgggctcctccctcccaccctacgattatacaatagatttaaagtctctgatatccacaaatctacatcaaaatatattctctagctgtagggaacgtctcagaattgttaaccttctccccaggtattagaggtaacacactgtgagattagatgtatattttcttcaagatacaccacccattgaggggttcatatttacatcttttgttgatattttttatagattaaaagcgcctctttgctaggtgataattctgctaagtactgtaatttgctgccattaatatttgtctgagtcctagtttgcaaaatatatttgaaaccacgttagaaagtcgcataattgcttctttaagctggggaaataagcagtttctttacccagcctttatcctgttaacctcagaggggaggggtgttcatggagtcctggaatcggctgagcacatcggccattgaattccagtgcctactgggggagacggtgcggcccggctgggcccagctgcgcccagctgctggtggcttctgggctgctcctccctgggccaccgagggacaggagacccatggagaatgcaccacccctgcctgggtcttaggccctggggtgtagggagagctgcctaacccctgggagccaagacaccgctcttcctgggcctctcttgggtcctcatctggaaaatggaggcactggcctcccagcctgactctcccaagggagggtgtggaaagccccgcccagcaatcagatggctctgtgcctgtcccattgtgggcgttccacaaatgttcagggcatgtgtaaatgacacagctggtggcctggccaagcctgatccctgggagagtggggcttacaggggctgagcatgccaggactcacagggctgggtggtggggcagggggctctctgtgatcaagactaggggcaggaggcccagggtgaccagcacctgagcctctggtttccaaggcagctggagaccccggctgtctcctgtgctccccacaccacacacacccaccctccaggcctcccaccatgggaacaggcagctccaggcccttgcgagcaggtggattctatagtcatgggactgcttacaagaggctgcaccacacagatagaacatccatctgtttccagtttctgtgcgcattcttcggggtcttctcttgcaccccaaggtggcaatcaactgggatatctctaatcagaagagcattttgccttctattgatctgaaatctttcctctccaactacccagcagctgttcccaggtgtgagctagggcaccatggagcaggactgagctctcacctccaactccacctcagccatcaggagcctcctagccagcctcagtttatccagtagtgagatgggggtaatgatagccctgacctaacagtggtgtttgttgtgaggattaaaagagtgaaggtgtggcgagcatttggaatagcacctagtgatagtataatagcatttggtaaatgttattggatattattatatggtacatccatcagcgtgtagagcgtgtatctttgtgtgcagagcctgtgtgagtgcgtgtgtgttctcactatgtgcacccctgtggatgtgtgtgacacacagtgcacatatctgtgtctagaggggttgcccatgtctctatgtgtgatcaacccaggcccacacgcttcctggggtgcccacaagcatggtttcctaatggcttcatctcctgcccctcaagttctgttctttccatctccccatgtcaccctcctgccttggctcccagcccagcctgcacatggcctgtccctcccaacccctccagcctgcccccacctcctgccattgctcgaaataccttcagggatgttcaggcttttgccctgccattctcccggtctggagcatcctcacttcctcttatctgggccaacttccactcctgcatggattctgactgaaatgttgcctcctctggaccgtcctcaatctctcaggtcccctgcattgccctcatcctgcagccctcttccgcatggtgccagcagctacctgctcccctgcgtaggtgcagatgcacctaagttgggagccctgtggctggggctcactcccatggcctccctaactcccgtcctggctgagcccattgtggtccacacaatcctgtcctctgtggctcctgagagtcttggaccctcaattcccttgctgaaggtggaaaggctgtctcaggggtggggccagccctcagacacctggtcatcacacacctggttatcaggcacccgtccatgccccagcatgatgtagtggagggtggggtagtaaagggatagtttgggtgaagtcagtgagtcagctggctctgctgggctgctgggctcaagacagtcgggagcaggtgcccagctcgagagaggcccctctagcctaggctggtgcctgggcacagcatagcaaggcagattgttgtagggtccagcccctctgagctgggagtacagagactgccctcagcttgcctgggcctctctgcctgctaagaagcttccaccagtggccagtgcccctctcccaccctgcagtttctggtatttggagggcaagtgcttgtgtcttcaggcgtgacccccatctcctcctcagattcctacaagatagggagggtacctggtggatccctacttggctgaacaagaatttaaggctcagagagaagtgagtgaccccaagtcacaaggctcactgggccttgggcttctgatgccaaatcgggttgttcctgagacccacaaaaggtggtacagccacccaggtccaaagaaaaaagctcaaggcaggaaaaattggggtgattgagctgggtgggggaggggctttgctcagcagatcctgatgcaggcccagccccagcgaggcccttctctgtgcatacccactggccttgccctggccacacaggccacagaatgggctctgcacactgggctgagggagggctggccctggccctggaggtgcagtgccgatgaccctacagaagcctgtcctgaatcttgaggggttgggagactgggtcatccactctgatggggtgaggccttggggcaaatcccccagcatcagtgaagtgagctggagcctgcagtggggctccggccaccagctacatgcactgcaccttccctcacttgccagccctggggtgaaggggacttacttctctgagcctgattcctgtctgcagagtggtgaccgtcctggcacctgcttcccaggagcgtggcgcgcattagaggagatgtgttcattcgggtttccacagaagtaaactctgagaggaatctgaatgtatttgggaggaagtgcagggagggagtaggagaagagaagacggccaggcgctgtgctcagaagcagcttagggccactggtaacgggggcttgggtctgctggggacctccagggaacagcagagcacaagagccctgggagttatcttcccagagggcaaggactccaggtgattatccagcagtttccctcactggcaagggctgcttccacggtgtgaaaccccaggatgcgtggccagtcccatgcgcctgctgagcacagtccagggccagtgactgtcctcagcacagtggcagatgctagtggtaggaggccgggggcactgggaatatggagggaaggggtgggggtggtgcatcgacattctagaaatataggccgggtgcggtggctcacgcctgtaatcccagcactttgggaaaccgaggcaggaggatcacatgaggtcagaaattcaagaccagtctggccaacatggtgatatcccatctctactaacaatacaaaaattagctgagtggcgcgcacctgtaattcaggcgacttgagagcctgaggcaggagaatcgcttcaatctgggaggcagaggttgtagcgagccgaggtggcgccactgcactccagcctgggtgacagcgtgagactccatctccaaaacaaaaacaaaaacaaaagaaaaaagaaaaaaaatacgcctggcggaagttagtgcttcataaaggctggcttctgctattattatttcacattggaagggcctccagaaatggtcacacctgatttgtgtattttcatcaacagagggaaactgaggtccagggaggaggtcttacccaaggccacgtgacatgcattggtggcagcgctggtcctgcactctgggagattcctccggggcatccttgggtgtttgcctgtttagcatgagtttatgggacagtccctctgtcctaggcaccccacgcactgtgtctcatcaaatcctcaccaggcggtgtgcaatagaaatcacaatccccatttcacagatgagaaaaccgaggcccaggaagggcagaagaatggccacggccacacatgttagggagtggcaaagctgcagtttgagccctccacacaggtgtttaactctagcacacatggcctttcacgagcattgaaactgataaaggggagttgcgggaagctcggtagtttcagagacaaatacattttgttgagtggaacaaatgttctggctataaccaagctgcaaagctgttggaaaagcacaggtcaggaatggacacggcttccagggaagccagggctcagagcaggttcaacagatggaggggtcgcggcccccagagctggggagcccacttgagaaagggttgagggagcagtggggactgcagagagaggctcctggattgagggtgagatgaccagggagctgggcacacccgccaccagtccgcccgctgcccatctgcctgctgactgccatctgcccactggcctgctgggtgacagaggtcaggagttcgagaccagcttggagctgaaccctggaagacacgccacccccgtgcagtgggacaaagatttgggcatggattcgctcagtgacttctggagggaagaggcagtcgccttcctttacttcctccagatcagtcttcgagctccggcacatggggagatcacgttggctgttaatggggtgtctcttttgtgttttcacagctgcagacactgggaaaccagggcgaggcttgcatccactgcactaatgttgcttttgtggtcacttggcttgatagtgtttctcaggctctgtctcctgggtcaggctgggtccttggcaatctctgcctgtccccttcagtaggtttgaaaaaccaagcctggagggatgcggtggtgatagactcacctttttggtctgggaacaggaacgagagatgctttcgtctgttttgagcagacccaacacaactccccatttccccaaaaccgacacaacaatgcagcataccaacactgtttttgttcttttcaacacctcattttgacgcaagagcttctcacacaccttggaaggggcttcagcccagatgaggggttttcattagcgttggagaggttgggggcctcagacaaatccatcctccaaggcagtgtattctgacgccgcagctgggctctgaaatggcttagaattttaggttttcagctaaatggtgaccagggcggtcagtgtgtggccaaactcattggaggagaagcggtcagttctgccctcttggggcctgtggctaggtgggaggtgagatggtctcagggaaaggcatgagagacctgcagtagcaaaacctccccccacaaggggcagcctgccctctgcagctgggtgtgccagaggaggggccagcaccctcagggagggcgggactgaacaagggacctccttgggctgcccagatgttactctccagggcctcaacctagtgtcaggcctgcagcgtggccttgcgtccttgatccttcagattacccatctgtagcaaggagatgatcatgtctcccctgtccactgactgatggaccacctgatatgggcgtctttgtgtttccaatttcttgtccatcctctgctcttgggtgtctaaggtcctgggatctattgtcttgtcaccagtggctcattgactcctgtagcccaggattccacttttgtccctgtatttcaccccccctcatgctctggtcactggtgaccttcacgtccatggacctaataggcttttctgccttcatcttagttgacctcttagccacatgcagcatgaatgtttcctatttgaaatacatgactttcttggcctccacactccacgtcctttcttctgtctttctgcgaagtcattcttgggtagctcttcctccttattctaaatgctagagtttatcatgtttattccttgggcttctttcctgcccctccttctccctgcatgatgctacctaatcctacagctttaaaactcaccttatcagttagcaattgctgcaatattactgtgagataaacttccctgcctctcattgtcagacagcagtgagcatgcatctctggtctgtgcctctgtgggttggctgcagtagctctgctccatgcacctccttctggggccagttacatgggcttgatcttctcatagcatgtattagtcagggttctccagggaaacagaagcaatagtacatacacagtcatgtgccacataatgacatttcggttaatgatgctctgcttatacgatagtgattccataagattataatggagctggagaattccaattgcctagtgttgtaggcattgtaacattatggagcaacgcgtcactccactgttacagtgatgctggtataaacaagcccgtcatattgtacaaaagtctagcacatacaattacatacagtacatagtacttgatactgataataaatgactatgttactggtttacgtgttaacgtacttctaattgttattttagagcctcatctccagagttgagtctgacctcctacctcacaactatcacagagtaaacttgggactcaactctagaggtggggctacttatataaaaaaagtaagtgtcctatacaggtataccattatttacacctgagctgtaaaacagcctcagacaggttctttaggagggattccagaagacagcattgctatcaagggaggcaacagctccatgcgtattactgcccctgaagatcttccagtgggatgagatgtggaggtggaggacattgatgatcctgcccctgtgcaggcctagcctcatgtatgtgtttgtgtctccatttttaaaaaaaagtttaaaaagttaaaagaaaaaagcttataaaaaagatataaaggaaatatttttgtgcagctctataagtgtttgcgttttaagcagtgttattacaaaagagtcaaaaagttaaaaaaataaaaaagttcataaagtaaaaaagttccagcatgctaaggttaatttattactgaagaaagaaaaatattttaaagtaatttagtgaagccaaaatgtgcagtgtttataaagtctacagtcatgccctaggccttcacattcactcaccactcactcactgactcacttagagcagcttccagtcctgcaagctccattcatgatgcgtgccattttttatcctgtgtaccatatttttactgtatcatgtgtatgcttagatacggttttgatatacaagtacttccctttgtgttacaattgcctacagtattcagtacagtaacatgttgtgcaggtttgtagccttggagtaatagtctacaccatacagcctaggtgtgtagtaggctgtaccatctaggtttgtgtaagttcactctgacagttgtgagatagtaggtgggactcaactctggaggtggggcttagacattggacctaattgagaactagttaaaacagggacggagtggaagcacctttccataagacatgcccattcgtgtgccatattggtttaccattgccatggcaacacctggaagttaccaccccttttctagggatttctgcatacgctgtctctaaatttgcacgtgattgaaagtggatataaatctgactgcagacctgccctggatctgactgcag[450 bp omitted]gcacaggaaaatatggtgtcccagctcaaagagagggagagcaaatttgcatcagatgaggaccatccacattggagatggtggtcatcttcactcggtctgctgattcaaacgctcaactctccaagaagcatccacagacacacccagaaagaaggttccaccagctacgtggacatcccttagctcaggcaaggtgacacataaaattaaccatcacaaagaaaatgctggagctcaagagaacaagatgatccaagcttctgcttctgctgtgtctgctactgcctcactggtctgctttgggttgaccccagagtcaggggagaggaagtttgcttggcccactgagagctgggacaaggatgtggatggatggttccattacaggagagtgaggggctgagataaataatttggtctccccagcacatctgtgccagcaactcccaaatatgtttctaggccaggctgtgaccttcagactcactccacacctcccttgacttctacacttgactctcctgaaggctacaggggatgattactcagtgcatctggtcttcccttgaagactcagtttccctgtttgtcatgtgagcaggttgattagatgagctactagttctgagagcaagtgtgggacttagggtcctgcatcgcctgcgtcactctagactttcttttggctttatgcccccttgggatttacctgatggttgagaacatgaacatttagccaatgacccatatggggagatggaagaagcttctgttgacccctcccaggtctgtgagcctggctctccacaagttctctggttccttgtgcagaaggttagctgggccatgctgagtgagtggatgaggttggtgtcctagttcacttgtgttgctataaaggaatacctgagactgggtaatttataaagaaaagaggttgatttggctcatggttctgcaggccatacaagcatggtgccagcatctgcttggcttctggtgagacctcagggagcttttactcatagcagaaggcaaagggggagctggcatgtcacatgacgagagatggagcaagagagagaaggcggagaggggccatactcttttaaacaatcagattgcggatgaacacagagtgagaactcactcattaccccagggtggacagcaccaagctattcatgaaggatctccccgcatgacccaaaagcctcccaccaggccccacctccaacattgggatcaaatttcaacatgagatttggaggggacaaacacccaaacagtatcagatgactttgccattcaggctgttcatggaatgagggaccctcacgatggccacgaatctgtctcctagctcaggctctgagttcagagagacaggactgaacttggaggctctaagctcagaaagtaggatctgtggggccacactttgggcaatgtctggccctgcagttccaccgctaccaaggtgatcaattcttctgcagtcattcttgtagaggcaggtgtggcctggggacatcgcgtcccaggcaggccgccctctgtcctgaaacaggcttcccggagccctgcgcaccccaaacaaaagctgcctctgactcctcagcctttgtgcacatctgcattattagcaatgctaataccattctgcaatgataaataattaaacaattatggtcatgaatcaataagtttagcacattttttcatcagcaaattgcactgtataaacaagaaatataaattaccaagtctaatttccccctaaaattataagcattttatatctaataattaaaaaagtgttagaattcaattttggatagttagaactttaaagaattttcagtttccaccaaacaccattaaattgtcatgttttatgtctctgaatctgattaacattttgagatctggcctcagaaatctttctttgttagctcccagagacgctccacccaggctccagcttctcaccatcctcacagacggcgaatccactgggctccggcttccaagggtctggatctgcgggttccactggagagcgaggatttataggaatttttgattgaaagcacaggtgacaaacccaaggcttgtgggctctgcacaccctccacagtcttttgtgtggcctgttggcagtttgatttttacgtttttgggggatgttgtttgctttgtctttaagtttagatgtccgggttttgttgaggaaaaagaaacccacaccagatttacagtcccctagatcccccatctcattctgtgcagcagctgccccgtctcaatggagcatgtatggtccaggtggctgcagtctccaccactccccacagtgtcttgctgtggctgaggccaccaacaattgtctcagaaggccacatgctctttttctgaccttggccccggtctcttttgcaatccccgatttagtggttagaatttgatgaccccccgaccccccactcagtggctcacacctgtaatcccggcactttgggaagccaaggctggtggatcacctgaggtcaggagtttgagaccagccaggccaacatggtgaaacctcgtctctactaaaaatacaaaaattagccgggcgtggtggcacacgtctgtaattctagctactcaggagtctgaggtgggagaatcacttaaacccaggaggcagaggttgcagtgagcccagattgcaccactgcagtccagcctgggagaaagagcaagacttcgtctcaaaaaaagaaaaaaaaaaaaaaagaaattgatgctctaagcatgtaagataaagttcacaaaggcccagaatcccagcatgttttacaggggggaacactgagtataagatgggtagtggttagagagtcaaggtcacccccaggccagctcccttccaaatgctgccaactgcttgttgctgccgtcccacccacctccagcccgagtagcctctcaccttccctggtgttcctgctgcctctggagaaccagacctctccgctccagcccctctccttccctcccttctcccaggctcccagagcagtgtcccagcctccaaaatgctctctttcttggcttgacctgtccgctaccaaaagatgaaactcaaccaagagaacatcaaggaacgccagcttcctacctccactcttcatggctagctgcatcggtcccaatcacgtggtgggggcaagtaataggatattccatccattagtggctcatccacggctcctgcaatgccttccaccctcgtgaagggcgccaccaggtacccagggggccagccgggtgctaggggtcattctggcagttccctccctttccctcacctgacaaccccccactcacctggcccccctgcctccccttcctcagtcctgtagattccagctctctcccaccctgtatcccctccacacaccctctccacagccccagctgcactgctttttccagcctcttaacttctttgaaaaaacattttcagcacagctgaagaagggaggttctaaattgagaatctgatgaggtacccctggccccagtttaaaatagtcaatgatcccgcttcctcaggaccaagtccattctccttactgctttacagtgtaggtgtgctggaggcagtgctgagaagtccacacaaggtagttcatgaatagggagaatgagcctcaggataaggcatccgtgtgtcggaagtgaaggctggaggccatgcagggtggtggcctttttgctgggctctctcggcctttgttctggtgaatccctctcaccttctgtttctcccaggtccacctcatccttcctgaccaagttcttcacctctcctgaggagccttccctccctaccccagggcctgtaagtgattccctccatcccctctgtgtccatgcagctctgtgtggtggggatggaccctggtgacatcctggtccccacagagctctgtgtggtggggacatatcctggtgacaccaggacccgtccccacagagctctacatggtggggacgggtcctcatgacacccctgtgtccatggagctctgtgtggtggggatgggccctggtgacatcgtggtccccacagaagctctgtgtggtggggatgggccctgcggacacccctgtatccatggagctctgtgtggtggggacgggtcctggtgacactcctgtgtccatggagctctgtgtggtggggacgggtcctggtgacactcctgtgtccatggagctctgtgtgttggggacgggacctagtgacactcctgtgtccatggaactctgtgtggtggggacaggtcctggtgacaccgctgtgttcattgagctctgtatggtggggacgggtcctggtgacacccctgtgttcatggagctctgtatggtggggatgggtcctcgtgacactcctgcgtccatggagctctgtgttgtggccatggccatgggttctggtcactctgtggtactgggagactcagcagccactgtgccttttggactctggatctccagtcctgtgggacagcaagcccaatgcccaggtgaacagaccccaggccccggaagcagtacactcacccacggaagcatgtggagtgcagacgggggcagaactctcactcccaccatgcccggtggactgggatgcacagacatggtccctggtaggccccagccctccctcccctcagggctgacctgtccgccatgtgcctggccacacctttcttgaacctggggatattttcagctctgccactgccctgggtgatgcacagttcctcgtttttccaggtcctcctcgaaactctgactctggagtaaggtttggtggacagagctctgttgcctcctcaggcccattgtgagttaggatctgttttcttgcctgccatcttccagagttgggctgggcacacaatgcgggctcagaagggatcctgtgcttgaaacatgaagggcatcacgcaggatgactgagactgaaactaacgaggtgactgacaagtacacagatgtgttaatatttcaccatggccagagtccagccagagggccggtgctgagatgcactgttcctggggcccttccagggccggtctgggtctctgtggaatgtgcgggctcaggaatcattgttcctggggctgttgtcacagtgtgtcaatgatattcattgaagaacatctctttgaatgagctaagaatgcttaaagagaacagtagccggccgggcgtggtggctcacgtctgtaatcccaacactttgggaggctgaggtgggcagatcacatgaggttgagagtttgagaccagcctgaccaacgtgaagaaaccccgcctctactaaaaatacaacattagctgggtgtggtgtggtgcttgcctgtaatcccagctactcgggaggctgaggcaggagaatcacttgaacccaggacacggaggttgtagtgagccaaggttgcgccactacactccagtctgggcaacaagagcgaaactctgtctcaaaaaaaaaaaaaaaaaaaaaaaagaggacagtagccatcggttaaagacatgcacctcttggttgaaacagactgatcagtcccagaaaatccctgctaagcagtcagctgccgaaagcacctgcctggggcctggaccctcgccaaatgtcaacatgatgttggggaccaacaggaacactggaagcacagtgttgaggagactggacatggagattgcctcaagctgggtttctcttggaatgcagagcctgaggtcaggcctgagggcgtatagcttactggggacatcatcccagttgatgggggccgagggaggtgggcagaattgtctaaggagtcatataaaatgcagctctcaagtgtccatctggagaaacaaagtggggactcatttacccattggtgccgtccccctaggtcgaggtgacccccgagggcatggattcctctccatactcaggttgcccacatgtgctctgcaagagatctgggcatgggctgggtgagtgggtgagagggtctctcactgcccctggcccacgaggggtatccactgcagggggatgcggggtgatagtccatggagggtgagaagcagtgctgcttctgcctgctcaggggctcaggtgattttggaggagacgagacattccaggcagagaggtcatgcccacacgtcgtggctgtgtcagcgtctctgagatcagccccattccaaggtcccaggtggacgcggacacctgggagctggggcagcctttgaagatgtgcagcgtggagggcgcagccaggggctgagtggcctccgctcagtgtcgcccctgcagcagggctggccttttcaccttgctgccgtccctgcctccatttgcctccattcgtgggtggaagttatcagggccatgggtgccaacgccaggatgctggggcttccagattttgtttcactcggtggctcttagcaacatgtttcttgcattctgctcattctgtttcacatttcacacttccccaggctgagcgagccatccatctagtgcaaacgcttctgacagggctggggtggaggacgccctgctggccccagcaaggggaaggaagggggcttgctgggtgggtgtgggtggcgcatgctggtcaggacagcctggggtcgatgtccctgcacccccgccccccgcctccttccctgtcttgcagagccctcttggagctggcgattgctctgaacagaccttcctcctcttttcattccagtctctctgatcacctggggagatacagaccttgcaccttctccctcacagcccagacaccaccggaatcacctcacacaccacctgaatcaccaaacatctccaaacagccctcagacttttactctgcaggggcaatttttttaaaaaaaatttctcttcaaccttctcaaagcctctagtcagccacttagagaagaactctccaaatttcctatctctccctctatatttatattgatttacatttaaaattatttttgcacagggttttccttgattttctttctttggcaattacagattaatctgaacccctagatttttgagtatgtatctatgtctctatttatctatctatattttattttaaatctgtaataatattcagaattagctcacaaaactggattacacaaagccagcaggtttaaaaatatttcaaagatgttgcttttatgcttcaaatccttgaaaagccaaatacattcacttctgaaactaagtcttgggttttgctgaaaaaaaaaataagaaaagtgtttaatagcacatatggcataattttatttgacatctgttttgtaacaaacaatatttagctcacttatttgctgaatgatacagtacacagtgcaaacaaaaagtccaatgaacagtttttccagagtttgtaatatatcaatatttattgcaaaagaatgcaaaacttaaacatttaagtgtgttattgattgtaatatgcaaaacattgattactgtatgttgccactgcaaaaaaaaaagtgtactaaatgccttctggggtatgaaaatgaggtgcatttcagcaagaggagctcacttgctccctttggtgacatttagtcttaggcctgccccccttcccccgtttgtgtcatcctattgaagacagctgtcaatatatttaggatgctttagctcatagcagcaaaaatggtgagactattggcttaattgtgaggagtgattgattttaatggaaacaacatttaaaaactcagaatgcactttctgttggcagtgctaatagaatcctctaatgaattgaagcttcacacataaatgcatggtacttactgcaacaattagcaaaggacaacaatggttgatgcattaaatttttttaactcaaaagttgaaataaattatttgtttacataatgggaccacgggaaccaaggcagaagcagaactggctatcacctgatacacaaagcacacaccaacaaaactgtggtcaagtgaagccacgagcaggaccctggtgttgttttctgtccttgccattattatcggaaaaataatatcagaaacaatatttaaacagatcctccttcaggttgttgggcagagggaaatggcgaggactccctgtcctgttgaggttctgtgtggtgggcgcatttttccttgggttgacatcagtacaatgacaaatgcagccaggaggggtgagctcaactggagggtcctgagggattgcctggagcacactcagaagcccccaaaacaaggcttggaaactgccccccaaccccagaacaggaaagttacagatttaattagatttttcaaaagaatcataatcatgaaagtaaaataaacagcagacatttactaagcatctcatgttccaaaccccacgtaagagatttcatgcctctcctcaggcatccctgaccttgacccctgaaaagcaacctgcaggttcagagggcacttatttggacctgcactggggctctaagcgcttggaggaagccatgacttgtgtcttccattttgcaatagttctcattagcgcttggtgcccactgtgtgcctggatccccaccgggtcgggggtggagtgagggcagagatggagagaccaagctcctgccctctagtgtgctgaagacgagggcttccaggaacccaaatttgtgtatggggcagtataggctcagaaaacagctttgagaggttcagaagggaagaggaggatgaccttgagcgtgtgatggttctcagggcccaacaacttcccctttataggggcatcctctcagagctgagagaccagaactgcagacagcctgggcatcccctggttcttaagctccccctataatttccccaccagtcccctcggcctctggctgaactgatggattctcagtctaactggctgcctctacccggggtggccttcatcacccttactcttaacttctccaaacctcagtcctcacgtttttcaaaggaaggttaaaggagggcccggtgtggaggttcacgcctgtaatcccagagctttgggaggtcaaggtgggagggtcatttgagcccagaagttcaagaccagcctgagtaacataactagaccccatctctacagaacataaaacaattagccgggcctgatggtgcatgcctgtagtctcagctacttgggaggttgaggtcgaagcatcacttgagcccaggagtttgaggctgcagtgagctgtgattgtgccactacactccagcttgggggacagagccagatcccgtctttaaaaattaaaaaaggaaggttagaggataaaggagataatatgtggaaaggactagacagtacctagcacagagtaagcgctcagaaaataccagtttttgtttgtatgcttcttattcattgttagtgctctaggcttctgtgagaacttgactactgcataatctctctgagactcaacttccttactgtaaaatcgagaaagcactgcattttattcttcagagggctactggggttattagaccgagatgattcgtggagagtggcctgccctgtgcccgatacagaacaaacactcagatgttaggtgacagtaacaagaataatgtcaatatcttcagaaacaaagaactaaccctggctgtgaaagggtttgtgctttggggtctgtccttgcagagacggtagatgggagacccaaggagacactagcatcctcttttgcagaaggttctagcagatgttgtggttgcaacaattggcatcagtgacttggagctgaaacctggcttgtggggtgctaggggagatctaggggcagcctaactcacctacccgcttcctcctccgtcctccgcagcagtgagaaacgatccgggaaacagaaagcagaggcgaacaatatatgtcacgaggaaataagaacactgcaccactagaataaataataatattttttccctggctttaatgaaactctatagatataaaaagctggagaaagggattttttttttacagaccttaattatagcagggttgttagtaaatttactgaattgcaaatgtaaaatattctgatggcctgagtaaaaccacatatttaagccttctaaatgaacatttctgttttttgagtaatttgtaccatctgtgtcaaaattctgagtctaaaaaaaaagcagtggaacaaatgttggttccataaaacagtcctagttcattgttgaaattgtcacacattaacattgcaggccatctgggaagacaaaagcctctaaccagattgcggagatgattttattggtctggtattaatcaggatatggcataatatttaagcagaaaggagagatgaggtgaagtggggcccttcatccaccccaactgcgcgcgagttgtaccagagccccctccactagggcgtggggcattttaaagccggtttcatcatcagaaaatgtaaataaaagccaaggtaatatttccggtttgaacagaggcacacaaaacacagaaacttcatgggttaggcggctggctcgggggagggagagctcttgttcagcggggtctacccagaaccacgccgaaatgaggtggagtggagcttccctttatcaccgcgcatctgaccctgagcgtgagagtcctcatgcccaggacggtcccctgctgctcaccgtccccgcgggtgcacagtgtcgaggccagcctggcctgcggcaagactcaccacagccagggttcagccctgacagctccaacccctgcaccttgggtccccttcctcttttgcactgaggctgagggccctgggccacagcagatcccagccttggtcccgctggatcctggcaagtgcccaggtgcagctcccatcagctcaggggttggtggcttggtggaggcaactcttgaggcaggtcactttaggattcacctctgagtgacaggggggttagaggtcacagtttagattatgtgcgtcttcctccggccactccacttgggcacacgcccctgggtgagtgggctggtagtcaaggatctgacattcgcccgatgggtcccactttctatgtacctctcagatctccgcgcggatcatctcacagcgcagagagatgcctgggcttaaggacgtatttttcatacaacttgcccctaaatgcaagccatcaatttcatcaagtgcttaatggaaggaacatggtctgccccaaatgctggcttgtgttgaacccactgaggggagggaggtcggcgtcctgggtgatggcttcctgagagactttcaagggaacttctgactttgtgctaacttgtacacactgtaccctcctgtgctgtgtggccctgtgtgattggggactcaggcggaggtgtccagggtgctgctgggagtgcgtctcctgggtccgctgcggggtggagagctgcagcggccaggtctgccctgccagccttaggccttcctgccaggagaagatgccaccccttctgggcagctttcaaggctgggggaacgcggtgctccctgtggaactgccttcatacttggttctttatctttgtccatctggaggttatgcacaaataaatgccttatgcagactgatggccttcacctttgctccaaatgctggcatatgtagagtctcttctcagcatctcctgcatgctgagccctgttgcagagggaagggagagccctggccacagggcgttgagtccagttttcaggaaaaacttaccggaaacagtgaaggacgtcacaatgggaaatgcaagttgctgggtccccagagctcagataatgagcatgagaactgtgggatgcattaagagggacctcctaaaaataagaacctgaaggccgggcacggcagctcacgcctgtcattccagcactttgggaggccgaaggcaggcagattgcttgagctcaggagtttgagacgagcctaggcaacatagtgaaaccccaactctacaaaaaatagaaaaaaattatccaggcatggtggcatgcacctgtggtcccatctacttgggaggctgaggcaggaggattgtttgagcccaggaggttgaggctgcagtgagccaagatggcacctctgcactccagtctgggtgacaaagtgagatcctgtcaaaaaaaaaaaaaaaaaaagaaaagaaaagaaaaggaaacatgagaccttgtctctaataaataaataaataaggctctatctctgaaaaaaaaagaaagaaatcaacagcccatctcttaaaacagcagcaacaaaatggacacagatcacacttctctgctatataaaaccctttagtggctcccacttgccccggaaagagaggccagagtccctgagaggcccttgccccctgggcttccatgggaggggccttccctgctcctccacaccgcagggccattgcccctgctgtgctgtctgcctggaagccccttgatcaccagccgggtcagcccggccaatctcttttcttctttcaataccaacacaggcagagcttctttaaggatttgttcctctggtctcatagcaccttccactcctcccttgctgctcgtaacactgttttaattaagtggtttatgatgtaattattgtttgtgccttcatgtctgaacacaaggagatcaactattttcccaatgaaaagatgagaacttttttggtgggggtcttgtttgtatatagaaactcataaggacgaagtcaaaatagtccaatgcttctttataatagttattaactatgttgcaatgcatacttgaaatcactttttttgagctagggctttattctgtcacccaggctggagtgcagtggtgcaatggtagctgactgcagcctcgacctcctgggctcaagtgaacctcctgccttggcctcccaaagtcctgggattacaggcatgagccactgtgccctgccccgaaatcaatttttttttaaaaaaattttctttccataggttattggggaacaggtggtgtttggttacatgagtaagttgtttagtggtgatttgtgagattttggtgcacccatgtccggagcagtgtacactgcacacaatttgtagtcttttatccctcacccccttcccatccttttcccctgagtccctgaagtccattgtgtcattcttatgcctttgcatcctcatagcttagtttccacttacgagtgagaacataggatgtttggttttctgttcctgaggtacttcacttagagtaatagtctccaatctcatccaggtcgctgtgaatgccattaattcattcctttttatggctgtgtagtattccatcatatatgtatactacagtttctttatctactcattgattgatgggcatttgggctggttccacatttttgcaattgcgaattgcgctgctataaacatgtgcgtgcaagtatcttttttgtataatgacttcttttcctctgagtagatacccagtggtaagattgctggatcaaatatccagtatctacaacgaactcaaacaaattagcaagaaaaaacaaatgattcaatcaaaaagtgggctaaggacatgaacagagaattctcaaaagaagatatacaaatggccagcaaaacatatgaaaaaatgctcaacattactaatgatcagggaaatgcagatcaagaccacaatgcaataccaccttactcctgcaagaatggccatagtctaaaaataaaaaaaaaaatagatctcagcatcgatgtggtgatcagggaacgcttctgcagtgctggtgggaatgtcaactagtacaatcactatggaaaacagtgtggagattccttaaagaactaaaagtagaactaccatttgaaatcactttttatgcaaggaagtacactcactgggaatgcttttttattctcccatgccaggaataaattgcactaaaattttcacacagtgccccctccactttcactgccttggctctcgggggagctgttttctcaggctcctgccttcagtggtatggattcatttgaatccctaaagatgctttggctcatgcctgtaattccagcactttgggaggctgaggcgggcaaatcgcctgaggccgggagttcaagatcagcctggccaacatgctgaaaccctgtctctactaaaaatacaaaaattagctgggcgtggtggtgtgcaactgtaatcccggctacttgggaggctgaggcaggagaatcacttgaacccaggaggcagtggttgcagtgagctgagatcgcgccactgcactccagcctccagaaatgcatccaaagctgtgagctccatttgggatccatattctccataaaataaccacttgacttattttcctatgtgacccttaaaagactgctttcctgtgacacctcgcagctgcagttttgagaccacaccccctccccaggaataggtatttttgttctgtttattttctttccccgtttttttttttttaacctattccatcaggtgacctctataagcatccaacattagcactgacggcggggcttgtaggatgaataggtctcttcctttaagttcaggctgaacggaattgggagcagagccctgcggtaggacagagacttcgcaaagcccggagcacacagcagcaccccgtcttctaaaggacaattttgggaaaactcttgcctaatattctggcactaaggatcattctgtcacatccccgctctggactacaagcctgcaagccccatccggggcagggctcctcattcctgtgcaccgtggaagccctgtgcctgcccagggcctggcacttgtacgtacttgaaaacctcgtgtggagtaaagagaggggtgatgtgcaaaggccttgaagtggggaagggtagttgaggtggctctggactcagcatggtgacaaacggagtggggaggggatggtccttcatgaagcagagtgaggaggcactgtcacacatgcatacacacacacacagagacatccacacagatacacacagacacagacagacacacagacacagacacagacacacagacatatagacacatagacacacagacacacacggacacatatatagacacacagacatgtacagacacacatacagacacacagacacacacatatagacagacacacacagacacagacacatacacagacacaccgacacacacagacatatagacacagagacacacacagacacacacacacagacatgcacagacacacatatagacacacagacacacacatatagacacacagacacacacacagacacatacagacattcacagacacacagacacacacacagacacacagacacacgcagacacacacagacacaggcacacacaggcacagacacacaggcacacagacacacagacacacagacacacacacagacacacacagacacacaggcacacacacgcacagacacacagacacacacacagacacacatatagacacacacacagacacacagacacacacacagagacacagacacacagatacaaacagacacacacccccacacacacagacacagacacacacacaaacacacatatagacacacagacacacaggcacacacacaaacacagacacatagacacacacacagacacacacagacacagacacacagatacaaacagacacacacacacagacacagacacacacacacagacacagactcacagatacaaacagacacacacccacacatacagacacagacacacacacagacacacacatggatacacatagacacacaaagatacagacatgcacagagacagacacacatacacacacacacacagacacacacacacacacacacagacacacacacacacagacagacagacagacacacacacatgagagctccagaggaaaagtgatcccaggccaaacagaagcctctggaagctggagcaggggttctgggattgtacccctgcctgtggccacagcccttgctgggcttgcccagtgataagcgcggaccaggagctcttctgagaagcccctcctggcgagacgttgttgtgagcctgctaatgtcttccacttaagcagcagccaccgaggtgtgccgcttcctggtgcctaatggcccggggtgtcgccgagcactattaatcccgctggccattaattccgggaaatgctcagggtcattacaggctgtgtggcttccaatgagaagtaactctgcaaggtgagcgcccaggccaccggccccaggaatggcctcctgcagggaggcctggtaaccagggcaggagggggtgcctggcctttgcacgtgtgtgtgtgtatgtgtgtgtgtggcggggggaagggggtagcaggcatgcacccaacatcaggggaccacatcaaaatggggagacagagatgtgcagcaagggctgttctctgcaaggacccagagagtcatcccctaagtgctgccttgaagcagcacgtggcttggatgtgggggtgctggggcaaaaccggaaggaaggatttttgctgctgcgagtggagggccggggacagggagaaatattggagaagggttctaggtagccttggtgtgatcttcaaagtgttaggtagagagtgctcagtttcccactctggtgaaagacaaggaggcacagaagggctgcagcagtgccaggcagagccgcaggctcgggctatgggtcaggacaggcagcagttccgccaacagcggagggtcttgtgcttttgcagggcagccactgcgtctcactctgttcctgctgtcccgctggcccagccactggctctcaacctggatggcctctgctgtcccgtgacctctgctgccccatggcctctgctgttccatggcttctgctctttcatggcctctgctgccccatggcctctgctgtcccgtggcctctgccatcccgtggccaccactgtcctgtggcctctgctgccccgtggcctctgctgtcccgtggcctctgctgttccgtggcctctgctgttctgtggcctctgctgccctggggcctccactgtttggtggcctctgctggcctgaggattctgctacctggtggcctctccttattgtgttttctctttataatatgagatctggaatcaggcctcccggtttcaagccttggcgctcctgtttcctagctgggtggccccgggcaaccgactgacctcctctgagcttcagttacattacccataaaatgagaaaaacaacagagcgttatgaggattaaagatgacaacaagtagatcatttgggaccagcctcgaacacagcaaaagctctgtaaatgcttcctcctcctcctcctcctcctcctccacttttcctctcttctgattttattgtttctgttattctctctgtgtgtcttctggcctcgatccctgactgtgaggctcatgggtgtcctgtcactgcctccgcagaggggctgggctgggccattatgcactttccagaaatgaacgtccctgttgaccagagtggcctgtcctcgggccatcgctggccacttgcggcaagttctctttggaagaaaagccaacctccagtttggtgaaagtgtcagcgttttggggtgcagagcatgtgaccctaatgtaagccagcacccctggtccctgccttgggagcactgtggtcctggcgcaaaccagagcacaagtccagttctgtcccctccagggtccctccctattcactgcctcagtgaccaccacatgggcagagcttgcagtttagccagcactgtcccagttcacctcaagtctgagaggtcggcctggccaaaattcaaatccccactttcctgatgcagaacggactgccagagctggattttcaacacagggccgccaagactggggccagctcccgtcccactgtgccacaccgtgtttgtgcgtttgtgaccccgtgaaaggcagaaccggctgctgtcgtgtgggtggatggagatttgggacaaggacacagacacagtcggcagagagtttgaccccagatggaggaatcgggtttggctaaatttctctggaatccttcaatgagtctggcttgctgctatctttaatttcgaagaccctgctgagggctggccccaccaggacgtggtgctcggggacagcagcccccagggtcctgaggcagcttttcctctacctggaccccgtttctttctgggctcagtggtgcatctcagccaggactctgctcaggctgactttcccgaagcccagagagcagggagcggtggcccccaccatgagtgggctggcagtgggtgtcacatgggggcggaagagagggaagtctgggaaataatgcccagccccacccactgaaggaccgggatgcagagaaatgtcactgctgctacacaaaagtgcggcattatcagccccttgcaaaggcaagtggattaaaatgccattaacacagcaaattaagcttacagtgaagtaaacaggaattaaatcaataaccagcacaggggacagctgaatttttccaaatggtcccccggggattggggctagtgggtgcatagggtagggggcagggtctggctggagaggggagggggtaagtgacatgcttagagattgaaggtccgggcactggcaatgggtacttggagggttcaggctgagacctgtccctccagtggggagcagcttcgcttcctgtttccacccaggtggctccccctgtttcaccagctgtccatacttctgaaagtgatgccagatagatgtcacctgcttggcatccccccactcttcctttgtcaatcgcacctagattcttcttcggggacactccatgcccccaaaatctcttagtctgtcctgttcagttagacccactctttggccgcaggctgtcccttgcccaggcttatagcacaagagaattgtgtccctatggtcacagcatttgatttggggatgttcagccaatccacatctgtgccaagaggcaacccaaggactttgactggagccttctaaaatgtcctgaggggctgctaagctgatgggatctggcattctattgcaccaggagagcttgggctgggagtgggctgagaggtaaggaggtagaggctggatttgagtgcctggatccagctgtgcctgaagctatgctggattttcccctgcattctattttttttttttttttttgagataaggtcttgctcttttacccaggctagagtgcagtggtgcaatcacagctcactgtagcctcaaactccctggcccaagcaattctcccacctcagcttcccaaagtgctgggattacaggagtgagccaccgtgcccgatctctccctgcattcttcaggaatctgaacctctctgtctcccatacttttattcttaagctagtttaaatcagaatgtggtcatttgcaactgaaagagtctagcttgaaaaataattttatttctttttttttaaaaagaaaattaatttatcaaacatctcttagggaccattgagcatggtggtgtcccttggtctcccttgcctgtcttttgcagtctggatgctgtttcctcatctaccctatggggttattgtgttatgccctaccagcctgtgtggctgtccctcctcaggccacccatacatgcatccatctatccattgacccatccaccaattcatccatccatccacccatccatccatctacccacccacctatccatcatccactcatccatccatccatttatctatcatccatccatctatccatcagttcatccatccagccacccattcatccatctacccatccatctacctgcactcccgccctcctcaggtgtacatacccatccatccatccatccatcatccatccacctacccatccatccatcatctacccatccatctattaatccatccatccatcattcatccatcctttaatccatccattcatttatccatctacctattcctccacccacccatccacccatccattcatccatccacccattcatctatacatccatccatccactcatccatccatccactcatccatccatccatccactcatccatccatcccccatcaatccattcatccatccatctatccatcccccatccatttctccatccattcattcatccgtccacctaatggagccctcctctggggcaggtgggctctatgctgggctatctcagcccactacctttcaagcctctgatttaatacatcttaggcaaaagaagaatctttaatgggggacacacggatgggttcttattccttttcctttcaggtctcttattcacctgccttaccgcagagctcctggagaaggggtaagacccaggactgagaacgggatgactttttctcctggcagctcctaccgagatccaagccacctccatctggaagcctttcatgactgtcctcacatctgggaaggcacctgccctctctgtgcgtctggggccccagggtcttcctttgtcaggctgctctgtgactgacacttcccgattctgccccctctctgttttgtgagctccttggaggtagggatcgaagcttttccctccctctgggctccagcacggagctcagggtgttgtgcagagcaggcctcaatatgggcctgctgagtaaatgaatgaatgacacccagtcgcagatgcttttcttgaggctctgattataggttctgacctgcgcttggggcactttttaggggccatggcttccctgtggggatctctgccccaccatccccactctctccacctacccccccttgtttcctcttttctaaagagactccttggccctgccttgtccagggcaagttcccacggtttcaggcagtggagtgggctgccttgaggaactgtgttttggggattgggtggcggtcagggtggagggtgcaggggactccccagaccaaggtggcatgatcaggacacgcttttcactttgcttggttattggttttccagagatgcttctaggaacacttcacacagatggagggaggccattacaagggtgattgttactgttcttactttttgggggaatggtgggggtgaagcatgcaactgccttgcacctcataggcaaggggttcgcttgctaaaatacccttctatttccctagcttggctccaactgtctggtctgtggccaccagggtctctggaggcctgacacccccagtctggacacctcgaagtgaaggggagaccaggggccgcccccaccccaactgccccacggacgcgatccctggccaggtcagggagggaaaaagaaaacgggtccaactctgaagagttctgcattcctctgttgatttttcccctctccctccctcaggttccaaatccaattctagctcctggccaactggtagaattaagggattaagagctacccaggtcttatcccgatatgaaaagatttcaccgagaggctcatagttcagcatccaaagccgaggaaatcgctctccgcctgccctggtattgttttgcaagcctcgctggaaccaccttttgagctcctggctgaggcatcgctgtttcacttatctcttaagacctcactcataattgctcaatgtccgacaagcagagagaaccctgggcattatctgttaagggccctctaatccagttcataaggacagagtgtaatcaggacacctcaaaatctttctaaagtcaacgcagaatgtcacatgagccctgagctgcttcctggcgaaccccggggaccaacacagatgccagccctccccacctcaccgcgggagggcacatggggcttgaaggcttgtgtgggcccagagcgagtgccggttggccagagagaccagaccaacttatgggggaaaaagactttgtattaaaaagcagaagggaatttttagcatgtgccagagttggtatgtaacttcatatgtgtgtgtgtgcatgtgtgtgtacataggtgtgcgtgcatggactttctggacaaaattaaaatgagtgagccctctccaggctctcatgagtccactgggtcagcttaggcagcaaagggcccccacagccctgggcacagggctgtatagctggtggcccccgacaggcaaggtggcagaggtgtggatgagtcagaggctgagtttctgcaggcccacgggaagctcgctgacaaatgctgttaatcttcggcagggcaggggcacctccagcacggagctccatatgggcgcacctagatctatcagtcgactgtcgactgccgcccttcatgggacacgggcgcgtccctctgactgatggagcctttctgggggctcacggagactctgggcaggtgcaagctcagatgccagaatcccctggcacctctcatcggttcatccacctacaactgacaaatggagctcccttccccactgcacaacagggaaggatggctttaaaacagcccgcaggactaagctgggtgtcttcttcctgtctagggcctcacctggccagatcacactctttccacttctctgatgtgagccagccagtgtggtggctgcaaccctcttctgccctccggacatgtggctccaccccacccatctctctggatgcctgagctcctgagtctgggctctgacagccactttccacccgctgatggctcccctctgtggctgcgtgctcagagtgtgccgacgcatcctgggattcctgcatagaaaataagaaagggctggtgtgtgtgttgacgtcttggtttgggtcccccagaagctgacctcaagacgaggatcccgtgaaagtcattgatttgggaggcaaccacagtaagtgtggtggggaggggaagtgagaagagaggagaaagccaccaagcatggcacaggatccacaggcaccagcatgcaccgagctcccctccagcgggggtgtggggaggcgccattgcacctgccacagggtgttccccaggaagggaagaaagctggcaggaatgctgccagttcctgggtgagggttacccccaagatattagttacctggcccttctggctttgaaggccaggaatttccaagatcctggagaagttctcagggacagaggcatagaacctctgcctctggccttgggaaagtgcaggtacatgccagctgctgaggtctgagagatgtgggcagggaagagccagcgttggctctgatggctttcctaggtcacatttcctgggcaggttggttagggagatgggacaatgtgtatatgagtggcaccaaggctggattctgctggccagctttcagctcttcctgtgcaaatttctggaggcctggccctcttgctgcctggttaggaccctctttccaaggcaaacacagtccccaccctctgatctagatgactgaccatcagccaagggcagttgcagttttggtgcaggccaagacaggcactgaggtgtgaccttgagccagtgacatccatctcagagccttgctctctccacctgaaaaacgggcaccttgcagataagcaaggggtagcccagaataatccacagtattggagatgaattcgggacattggtgtgcacttctgcttagcctaatataaatacagatggatgcacgtaaaggtattttagatatgtctatatacaggggttagtgtacacacatctgcttcctggctctgtccaccgagagggcctagaaacaacgacatcccagtaataacacctaccacccgggccttggtttctaataccatcctcaaaaccaggagccagaattcgttgaagaaacagcccattctaggattgggacaggaaatgtcagataagcctgaagcatattacagtgccaaaaagtagagtgtgcacacacacacacatatacacaaatacacatatacacatacataagcatacacatacacacacacatagacacacacacatacacatatacacaaacacacacacatacacatagacacacatagacacaaacatacacacacatacccatacacacacatacaaacacacatgcaatggtggggcttgtcaaagagatgtagggatcaatgtaagagcccccagtggccaaaatcagaataattcgagcaagaaaaatgtagtattgcattacaacccaaagtacaggccgggtgtggtggctcatgcctgtaatcccagcactttgggaggctgaggcaggcagatcacctgaggtcaggagtctgagaccagcctggccaacatggtaaaaccccgtctctactaaaaatacaaaaaattagccaggtgtggtggtgggcacctgtaatcccagctacttaggaggttgaggcaggagaatcacttgaatccgggaggcggaggttgcagtgagcagagatcgcaccattgcactccagcctgggcaacaagagcaaaactctgtctcaaaaaaaagtacaaaatatatatccatgaatccatactgatataggtaagtagttgaataaataaataggtgggtgagaatagacacatcccgtgcagaagaattccacgtaattgacgtagatgcccctccctcgaggaggcggatgatcatcccagctcttaagtgtgggctgcacccagtgaccaccttcccagtggtacgctatggaaacagggttgagaaagaggagcttgaccctggagaaacctgagcccaaccaggcgaggaaagtcaggggcaagtcctcctgagagtgggatgtggggagaacggtccttatcccctgtggcctttctcccaagaacccatcagctcagtctaactgtgagaaaagtagcagacagccccaacttgagggacattttacaaaatatctggcctatgttcgtcagatctgtcaagggcattaaaaacaaggcaagtaggagaaatagttgcagtctagaagatcctaaggagacgtgagttctaaaagccacggggtgtcctggatagggtcatggaacagaaacagtacattaggtacaaaccagggaaatccgaataaagtgtggacttccgttaataatgatgtaaggaacattggcgcctgatttgtggcagatgtaccagagcaatgtaaaatcctaacaatgtgggaactctactatcttcacaacttttctgtaaatctaaaactattctaaaattaaaactttgttatggctgggtgctgtgtcttatgcctgtaatcccagcactttgggaggctgaggcagacagatcacttgaggtcaggagttagacaccagcttgagcaacatagtgagatgccatctctacaaaaaatttaaatattagccaagcatagtggcacacacctgtagttccagctactcaagaggctgaggtgggaggatcgcttgagcccagaaagttgaggctgcagtgagccatgattgcaccactgcactccatcttgagcaacagaatgagaccctgtctctaaaaaaaagtttatcttaaaaatggggcacctctcctggaaggcagctcagccattatgaaaggaccctgacctggcatcaggggatttgtattcttgtcactaagtgactcttccccgctgggcctcaatgtcttcatctgccaaatggcagggttgaatttccacgtctgatcttggctgtctgtgatttccttcacacctggcttgagttgctggggaaaacttttaaagaagaggggcacagctgagggcatcttttgcagagcgggtggctgaggcgcatcgtggctggacctgagtccatctgccctggtgcctgcatgactggcccttctccttcacagaccatggccccaggctcccttgctttcatttcccagcccgttattggggcaggagagtagcaagcgggggagttttgatgaggcgaggaagcagtgatgtgttttaatgcactgtttcctggggacctagaatgaaaattttaacaactcagaagctgtgcactgaaggcgcccctgctgcaggttctcagaagggtattccaactaaattgcagaaatataaatatgcatcttcctcgcttttgatgagctatcactgcgcagagcccgaatccccaagtggcaaggtgtttttccactcaatgggagaacagccatcttcggttggcctggctgtagtgctcctcagctgtgtttgcactttgtggccataaggccatgcgcttcccaggacctgccgagagctgaccttctgtaccaagctgggagacagcccaggaaagagaaaaggcaaaaaattattttaaaaacaatacacagaggctgggggcagaggctcctgcctgtaatcccggtgctttgggagtcccaggcaggaggctcacttgaggccaagagttcaagaccagcctgggcaaccatagtgaaattgtatctctacaaaaaatttaaaaacttagccaggcgtggtggtgcatgcctgtggtcccagctactcaggaggctgaggtgggaggatcgcttgagcccagtagttcaaggctgcagtgagctatatacagtgagctgcagtgccactgtattccagcctgggggacagagagagaccctatctcaaatttttttgttttttatgttttttgtttttagactgagtctcactctgtctcccaggctggagtgcagtggcacgatctcagctcactgcagcctacgctttccaggttcaagtgattctcctgcctcagcctccaagtagctgggactacaggcaagttttaccacgcccagctaatttttgtattttttttttttagtggagacagggtttcactatgttggccaggctggtcttgaactcctgacctcaggtgacccacccacctcagcctcccaaagtgctgggattacaggcttgagccatcacacctggcctcaaaaattttttttataagtaaaaaataaagataaaaaatgaaaaacaatgcatgaagatgcccggcagaaaaaatagggttttacaggataagtcattacagtgctatccatccacagggcctacacacaccagctaactcttaagcttgggcaaatccttccagagaatgcaggggggaaaactgtttccgtaaaaccttcagcatcagagccaggcacaatgtggaggagacccaatccagggctctatgggatgtatacctttccctctccaccaaggctgtgaagtccaggccctgtgcccctaagtgggtcgggcccaggatctctggagtctggacattccacccaccgtcccctcatggagctgcatttctccggccttgggcctgagcctggtttcacagccttcttcagatacctgcggagacacttccaagacagcaccgtggtggtgtttaatgaatggcaaacactctctcacaaacagaaagaaaaaaaaaaaacctccacaaatccccaaacctgttagctggaaaatattccaagatcaacacattttaattcactaattaatacagctaaaaggcatttttcatattagacttattaaaatcacttgtatttaagtgtttttgaactcatattttccgatgctgtgcgttttcctaaagtgttctagtcatgttatgcaaatgcctatttaaattaccaggggtatttgttgtctatttctactctgtaaaacataattttaatacaagttatttgtgaaatgcacattggaaaaaagaaaataagatttgagatggcatttctatgataattttattgcaaatgttgaccatgtttttgtatttgtctgcaagaggtaatgcaaaatatacataagacatatttccgggatttattgttatatgtgactaaattagtaaagcaaaatttgcttcattgtttgaacccgaggcagggcagtccgtcaccttgtgaagcatgttttagacgaacagtcacggccacgcagcaggcggaacccctgccatcccagaaagaaaatttgctcttgctctccactgaaacacgattttctgatacctgtgtgctgccaggcatgatgtttgaggcataaacccagacctttgccgaggacagggagactcggcttgagcaagacaggagtgctgaacggaagacataacgggggttctctggagtgataaggtggcaatgtggtggccagacttcagggcacagggagtcctgggaggggcttcttgaagggtctttctttgtctacttatcagaaatatgtagccttcctactaccagcgtttttgatacacatgtgatacaggcataataagatggctagaagcaaaagatgaaattgagagagggaaccctggcagaaatgctatttctgagcttcctggcagccaaggtgaaaaaggaaacataatgagtttaatgacactaagtctcccagcactttgggaggccgaggcgggcggatcacgaggtcaggagatcgagaccatcccggctaaaacggtgaaaccccgtctctactaaaaatacaaaaaaattagccgggcgtagtggcgggcgcctgtagtcccagctacttgggaggctgaggcaggagaatggcgtgaacccaggaggcggagcttgcagtgagccgagatcccgccactgcactccagcctgggcgacagagcgagactccgtctcaaaaaaaaaaaaaaaaaaaaaaaaaaaaaaaattacactaagtcattgtccaggtaaaaaatgtctaccttttgggaagagggatagtttccccctagtcttctagtctgagtgaaatccaagaaggcccttcataagggaaaacaaggacacagcaagctctgttcccagcggtggtgagcttacacaggctgcagaaatgtcctgaagggctgggcacggtggctcacgcctgtaatcccagcactttgggaggccaaggcaggtggatcacttgaggtcaggatttcaagaccagtggaggctgcagtgagctgagatcatgccactgcactccaaccttggtgacagagactctgtatcaaacaaacaaacaaacaaaatcctgaaggaagatggttgaattgaaaccaaaggtatggtcagtcacaggttttaaagattttcctgcggtgttgttggggggacctgtgacggaatgagactctgtctccaacaccccaaccccagtcctacaaggacagtcactctcacctgtgtcgacaggacagacactgagattttcccaagggggagaggccaccatccccagtgcgggctggcggtaggagcactgtagagcctgtgtcctagtggggacagcattctcttgagtgcttattccttttaggtgccagtggttaggggttataaaaagtgtggaaacacaaactctgctacctgttacctacctgttagctgggacagcccttccatcgatatctgtggaatgagaacttggtttgctctagagaaaggggcttcccaacatcgcctgaacatacacagcaagctcttgttcacaatagactcaattcaattcccttcctttccctttccttcctccctctcctcctccctccctcctcctatccctcccccttccttctccctttcctcccccttcccttctctttctttcccttcccttcctccctctccttctccctccctccctgctcctatccctcctccttccttctccctttcttcccccttcccttccattcccttccttcctctcctcctccctccctctctcctcctccctccctctctcctcctccctccctctctcctcctccctccctctctcctccttttcctcccccttccctccccctttcttttcatccgccttcccttcccttcctccctctcctcctccctgtctcctcctttccttttcccttcccctcccccctcactcccttcccttcccttcctccctctcctcctccctgtctcctcctttccttttcccttcccctcccccctcactcccttcccttcccttcctccctctcctcctccctctttccccttccccctccccttctcccttccccttccccttccccttccccttcccttcccttgacaaggtcttactctgtcacccaggctggagtgcagtggtgtaatcatagctcactaaagcctcaacctcctgagctcaagtgattctcccatgtcagcctcctgagtagctgggactatacgaatgtgccaccatgctggctaatttttaaaatttttttgtgagagacaggttctccctatgttgcccaggctggtctcgagctccaggcctcaagcaatcctcctgccttggcctcttaaagtgctggtattacaggcatgagtcaccacgcccagcctccatataggtttctggaagggaactgacaatggagactgctggtgcgggtgggccaagccgtgggccagtctggatttacagaagctgtgtggttgtgggccaggccttcactgctctcagtctgtccctcataaggtgaggacgaaccctaccatgcagagacataaagatgacaaaacacttgcaaagtacctagcccggtgcctgcccgggcagctggtgctgatggggcacccatgaagaccatgatgcccagatgacagtaagggtggcctgtgggtgccacttaacttccaaagcacttcatgagccagatctcattaaagccatgttgcaattctgtaaggttaggtatagctatcaccacccccatttcacaggaggaattggctcagagaggttcagtgacttaccaaggaacgcacagcatgtcaagagtgagcctgggatgcagagcaggtcttccaggtctcaccgggcagcactttaatcctctcccttcactctagaaagctgggtggacctttgggctgggttcaccatcttcaagaaggaggcagcttcggaggctggcatgggtccaggactgcatgtccagccctttggaagtgtcaaatctggacaagaggtgggacaaggcctcggagccagggactgaccacgggcttggaggtcatgttctatcttccctgttgcttcccctcctccttgtaccaacagggccggctaattaggcaaggcctgtggctccatatttaacaaggaaggtggagggaccctggctgtgtgtccccccctgactttgtgtgccccacaccacccaaacctggtcaatgagcaacgcctgccccaggccctggagcccgcaggcttagtttcctagagtctccgctgttgcactgggttctatcactcaaaagggcactctggatgggcctattcagaggccattgtctggccagcaaagctgagcatgtggctggagggcattagcccccctggtggccacatagggagacccaaacaaaaggcctggactgggaagtgcagaggccgtgacagcaattctaatttttgaggccttttgaagcatcggtgcgctcggagagcctcttccctgtatcattcttacgtggatcaacagatgttttaaaacagagctcctgatgcaggggaatcctggcaggctgcctcgctgccctgagagggggctctgcagatgacctcaggtaggcgtttgctgagcgccaccatcctggcaaggtgcacagctctcatgatctgctggggagggtctccctcctgggccaggcctcactgaggaccagcccacaggtctccgttcctttcctccccttctgagctgctgtcctggcctctgagctggtctctcagtagcaggaggagccgacagaggcaagggcctgtttccctgcaggtgctgtgtgccttcaacacgcagaggctctgagggccgggtctgcagacacccacaagggagtcagccaaggccactgaagtccactcagaaaaaaccgctgctctccacagggtgacttggctttcagtctccagatgtttactgagcaccttctctggaccaggctctggactgggctcaaggtcctggagggaccgagacagatgtggacctgatcttgggtttcagcggctggaggtgaagacaaacactcaatgttacaaatgctaagttaatcatcacagcttgcaaagtgtgtcaaaggggagacagttggccatggctcatgcctgtaatcctagcactttgggaagccaacatgggtggattgcttgcggtcagaagttcgagaccagcctggccaacatggtgaaaccccatctctactaaaaatacaaaaattagctgagtgtggtggcgcatgcctgtaatccaagctacttgggaggctgaggcaagagagtcccttcaacccaggaggcagagtttgcagtgattgtgccactgcactccagcctgggcgacagggtgaaactccgtcttagaaaaaaaaaaaaaacagtctagtggagccctcccctagaaatcaagcctgaaagaagactgtggggcacccatctgcctacctgacagctgtttagtaagctcctactgtatgccaggcactgagtgaggggctcggtgtgcacagcgaaccaagcctgacaagatcatcgttccgctggagtgtatggtagcgtccagggtgcagagaggtatgctgggaacagcaaagagataccttcatttaggggagtggtgaacagtgggatgaaagaaataaaataggcaatgtagtggggtgctgtgggtgtggggagggcctcctacagctgagggaggcaggaaggtctctttgcagaggtcatatgggagcagcagcttgaatgaagtgagcagggagctggggagagggagagtgcccccatggaggaaatggcaaatgcaaaggccctgtggcaggcaggaaccaggcaggttgaaggagaacaaggagcccagagcgcctggagcatgtggcagggacaggccgtgaggggaggtggaagagatgcacatggaccatgaggctctgcaaggccagagggggccatctgaattctgcttctcatgcaatgcagagccactgaaggggttaagagaagagtgacatgatttgcgttgtgttaaaagtaaatcccagctgtctcagaggctcacacctataatcccagcactttagggggcagaggcaggaggatcgcttgagctcaggagttcaagaccagctgggcaacatagtgagaacccatctctacaaaaaatgtaaaaattagtcaagcatggtgacacactcctgtagtcccacctactcaggagactgaggtgggaggatcacttgagcccaggagttagaggctgcagtgagctatgattgcaccagtgcactacagcctgggtgatggagcaagaccccagctctaacagaaaagaataataaataaataaacaaatccctctggctgctgtgtgcggaaggatttacagaggcagcccagctcagggataatggtggctaaggctcgagtggacacagggcaggcgggatttgaggtgcacctgggagccagcactgcctggacttgctggcaggttgtgagggaggagtagtaggaaggggagagcagcgggatctctgggtttgtggcttgagtaactcacccagagagcccacagtcggagccgtctgccatcaccagtcaatgtggagggagcaagatctgagtggaggccacctgtgcacacggtgtggggaggccccgtagtcctgggagccggtaggaggctgtttgcttgtagcagagccggggaaggtctcacggagtggggagatctgagctgtccttgaagaatgagtagatgttgggctgtgaggaaagatgaagggatggtgggaaggcagctgaggggaagatggaagtggtgtgggtttgggtgggttgtctgtctggcagggagtttatggagcaacatggggctgatagaaatggcccaggttttgtgtcacggcctcaaatgcctggataaggaggccagatttcgagtgcaggtgtgagtaattccggcagaccagaagggagagcaaagtgacaagtccaggtcaagctgagaattcccaggacatggctctgtctaagcattgggccttcccctttctggacccagtcatgagaggcctacgaagtgggccactccccttccatctggagatggtggattctagagcaggggaaggctgtggagctgtctatgtccttcttaccctgtcctgcacgtcctgcacaatctggtcctgtgagtgcttctccctcatctccagtcctctcccatccctctgcgagctccaggcacactgactttttgctgtttcgcaaactcaacatgctcctttgcgccccagggactttccacatgttcctccctctgccagaaagcttcccctccactccttcccttggctgattgcttcgcgtcattcaggtctctgctcaaatggctcctcctccaagaagcctccctgacttacagctccaagcccttacccattccgtcctcatttcgtcttctttctggcacatatcacagactgagaccgtgttgtttgtttacttgcatcattgtatatctactgcctctgccccaatcagaatggaagtctcatagccttgagaatttgatcatcttggttactgctgtgtccccaagactggaagatttccctgcacaaagtgagtacccgtcagtatttgctgaatgaataaatgttttggggccccaccttgacaattgggtgaacagaccaagcccccacccgcaacccccaggagatctggcaggcccagggcagtcccccaggaccccagacctcctgaccccagtcctgcgctctgccgggaggtttgctgctctgccctccctgggggtttcagcagcaggaaggccaggggtgttctgggtttggtttttgtaattggttggatatgatcatgaaaagcatctaacaattggacagctggaaatgtttttcctcccatttattacttaaaacagccttggagtttctggttgtttttaaaatcagattctcctcacttaaaaaaagaaataaaaaaattaaaaaaaataccatgaacccactcttacatatttttgaagagaccctgcaaggtcatgacaaggcctctgtttgggggagttggaaggggggcttctccatgctccagagaaggcctgggagcgtccagagctgggtctcggccatcccgcagttgtagtatcaggaggggaagataaattaagatgagtgcattgcacagttagacattagccatgacagtgaaaaagtattgtgaatgttaaaacggcccagactaaaatataccgaggttaaaatacagggtaactttacaaatcactaataatttctttggctttcactgcaataacattgatttaattcattagattcctttctaaatctatatttcagttttagagttgtcagtttctgttaatgacaattttgccccatctgttccaacatgaaaatgaggctccttgcagcagacaagatagatctctaagagtttaagaaggagaaatcttaaaggtatttcactcagatgaggccctatttgatgattcacactccaaatgaagctgcccacagaaaacttttcctggacgccagtagagagatgaccccctcccccagtgactcccaagcattcctgtgcctgtggctaccccagtatcaaatgggcccctgtgtcatcttcgtctcatatgtggaggggaaatattcaaaacattctcactcgttcttttttttttttttaatgacagagtaataattcagggtgtcagcatatcagaattccagtggctgtgattagaatgacaatgagttgctgtgatctggccatttgaatcgtcatattacagtaagtcatttccgtaaggcctggtgagcttctgtctgctgaggggccaaaactcagtctgggttttcagctctggaagaaatgtctctgatattcccctccagtctgccagcctctatatctgtaagctacctgcaggagatagttttgtttcatgtggcttcttttttgagactgagtctcactctgtcacccaggctggagtgcagtggtgtgatctcgactcactgcaacctctgcctcccaggttcaagtgattcttctgcctcagcctcctgagtagctgggattacaggcacccatcaccatgcccggctaatttttgtgtttttagtagagacagggtttcaccatgttggccaggctggtcttgaactcctgacctcaattgatccacccacctctgcctcccaaagtgctgggatgacaagcatgagccaccgctccaggccaacaggagattgttttgaaaacatgggtgaagactgtgtgcccaaatccaccggcattggaggggtcagtgtgggcttggcacaagcccccatcaggaacgaatgggaatttaagagcacctggattttctgaagagcaggagaagccctgcccgtccagctgttcgggaggtgctctggagtctgcagcagggtcttgtgttattgggggaggacattccactccttgtcagctgtgaaaaaaatgaacccacccacgaaagaagacacagcgcatagttcatgacccaaggaagaggggatttctttaaacattcgaaaaccttctagaaaaatatgcaggcattaaaacatacatggaattaggccggatcctcaaagttaatattcaccacatgtatttacattcaactcaacgccagcaaattgagtactgcattacagcttggagaaagaggagattgcctctcacacaggctgacattaagttgagttactgttctgccgtagacttctccaggaagtcaaaaagacagttgagagaatcaggctgaaaatcctcctggtacatctacctcctaatttcaaatacaaattagtgaaattttaacatttcagatgtcataccttgagcaaattaaaaatcaacaaaaatattaaggttctatgttacctgctcaaatgtacagaatgtataaaaactttaatcaaacactcgggtttgctcagttttaaattgtgttagtttaatagtttcttttctgctgtttatattaatgacatattcccatctaaatatattgccatgctgaaaaaccatcacaacatttccaaggttgaatgaatgcagttgccttcatggttttttaataaaaagatctctttctattaagttccccctcttttttttttcttgttctccaaagactgaggagctctgcagtgtgtacagtagcattgggactgagataaatacacattgccaccacctcatttagtgtgcaaatgcctcctctgcagctgtgcagagctgaggaaccaccatttcctccaatagcccagctgaggacgaagccgcggaggggctagtggcaacacaaattgctttttctaagcatcgactgaaggtctcatcacttgggaaaatgtcttaatttgctcttcttagcaaagtggttgtatgcactctcgactctgttggaggaacctcgccctgtctagatacatctagaaggatgtgcacataggcatacatgcagggtagatgccaggccaggagaacccaccagcagtcgactggaggatctccaagtcccatcacaggcatggggtttaacaccttctccccagcacccacctggctatacttcccatgctgcccctctgattggagtctggtcctcagctctgaaaggcacaggtaatacagcctactgtgctccaatcggtctccaatttggcaaaaccaaagttaaactttccagttttacaaaattgagcaattcttagagttcagagcaggggaggaaaagtaaatcacaggtaacccaaaggttatttgaagataaattccctaggagccaggatactttgaatttgcctgcttctgggcttggggcagaggactccagctgtctggctgggctactcacaactaataaataggtgagctgtgcaagatggcatctgaggagttcccatgatgcaggactgtcctccatgggaaatagccgactcttttaatacaaggcaagctcaattcaatcacaagtgcattataactctaagcacaaataaatgtattattcctacatttcgttatgatgtaaagcgagtcctatgaatctaatcacttacaagttctgatcaaaataacaaccgttcatctgtctaccttttcttcaaagttatttttgagcttatcgaccattatagactatctcaatcacacagaccaaaatagataatgtaataaacacatacatgtttaaaacacccagttttatcaaaccttagcacaatgtcgtatctgccccagatttttttcaggaactgagacgttaccgcagcagtgtgccctggtgtccctcttgcccagggaccagcatcttcatcatagggagtttttaagtgctggtggcagcttgcggggagaggctgattgacctagaaaagggggtgctacttggcagtatcatcttcaacttctttcgtcctcatccccaggaagggaaagaaggaaggttccaaatgaaggacacacatttgacccgaaggcccagcaagaattgcatgttgcaatgtgcactgtgatctgcaggcgagagaaatgaggtgattaaagctaaaaatgaatatgcccgacctgggaaactagccttctgaaataattaggccatgagacgcaggatgagggagcgagattcaggtgtctgttgaaaaagagagagactctttccccccctcgtgtgccttttccaaatggctgaaaagtacctcagttgtctcctggaattcgttttagcagcaattcatttctgaccacgcaggacttgggattcaagatgtgtttttctaagccagttgtgatgagatccggggctttgctaatcaactagaaatatgactggatatgaaatctttacctgtttaagaaaattatatattttgagcaaattaattccatctggacagttacagcccataatcagctatgttatgcaaatagtatctttgtggttgaaatcaataacttattttcttctgtaataaagaaaaaagggggaataagttagtattaattatgtacaaaatgaaatattttcttgcaaggttgcgggtttcatttcattatgaaggctttccttgtgccagtttctaggatgctgatgagacccgtgcttcaggatgacatccctaaggccacctcttgttggggagaaggttcagggagccgggcctgggcatgcttctctggggaagcccgtccagcaatgccaggcgatgtctgccagcaccccctggcttgggctttttcctcgggctgtggttctgaggatcaccttatttataaagcttgctgggccacagttagtatcagcttcagttatagatgaagttaatgacagtattgattatgccataacctatgttaatagtgagtgtattacctcttagccatcgggccgtatttatgggctgtttcttcccttccaatcatggctgactcctgcaggaatatcatactttttttttttttttttttgagacagagtttctctctttttttttgagacggagttttctctctttttttttgagatgggtgactccagtcacccagactggagtgcaatggtgcaatctcggctcactgcaatctctgcctcccaagttcaagcgattctcctgcctcagcctcctgagtagcagagattacaggtgcccatcaccatgtccagctaatttttttgtatttttagtagagatggggtttcactgtgttgaccagcctggtctcaaactcttgacctcaagtgatccatccacctttgcctcccaaagtgctgggattacaggcgtgagccatcacgcctggcagaaaatcactctactctttcttctggtcaaaaggagtgtatcttttgttttttttttttttttttttttttttttaatgtttttttttttattatactctaagttttagggtacatgtgcacattgtgcaggttagttacatatgtatacatgtgccatgctggtgcgctgcacccactaacgtgtcatctagcattaggtatatctcccaatgctatccctcccccctcccccgaccccaccacagtccccagagtgtgatattccccttcctgtgtccatgtgatctcattgttcaattcccacctatgagtgagaatatgcggtgtttggttttttgttcttgcgatagtttactgagaatgatggtttccaatttcatccatgtccctacaaaggacatgaactcatcattttttatggctgcatagtattccatggtgtatatgtgccacattttcttaatccagtctatcattgttggacatttgggttggttccaagtctttgctattgtgaatagtgccgcaataaacatacgtgtgcatgtgtctttatagcagcatgatttatagtcctttgggtatatacccagtaatgggatggctgggtcaaatggtatttctagttctagatccctgaggaatcgccacactgacttccacaatggttgaactagtttacagtcccaccaacagtgtaaaagtgttcctatttctccacatcctctccagcacctgttgtttcctgactttttaatgattgccattctaactggtgtgagatgatatctcatagtggttttgatttgcatttctctgatggccagtgatgatgagcatttcttcatgtgttttttggctgcataaatgtcttcttttgagaagtgtctgttcatgtccttcgcccactttttgatggggttgtttgtttttttcttgtaaatttgtttgagttcattgtagattctggatattagccctttgtcagatgagtaggttgcgaaaattttctcccatgttgtaggttgcctgttcactctgatggtagtttcttttgctgtgcagaagctctttagtttaattagatcccatttgtcaattttggcttttgttgccattgcttttggtgttttggacatgaagtccttgcccacgcctatgtcctgaatggtaatgcctaggttttcttctagggtttttatggttttaggtctaacgtttaaatctttaatccatcttgaattgatttttgtataaggtgtaaggaagggatccagtttcagctttctacatatggctagccagttttcccagcaccatttattaaatagggaatcctttccccattgcttgtttttctcaggtttgtcaaagatcagatagttgtagatatgcggcattatttctgagggctctgttctgttccattgatctatatctctgttttggtaccagtaccatgctgttttggttactgtagccttgtagtatagtttgaagtcaggtagtgtgatgcctccagctttgttcttttggcttaggattgacttggcgatgcgggctctttgttttatgcaaataaactagaaaatctagaagaaatggatacattcctcgacacatacactctcccaagactaaaccaggaagaagttgaatctctgaatagaccaataacaggctctgaaattgtggcaataatcaatagtttaccaaccaaaaagagtccaggaccagatggattcacagccgaattctaccagaggtacaaggagcaactggtaccattccttctgaaactattccaatcaatagaaaaagagggaatcctccctaactcattttatgaggccagcgtcattctgataccaaagcctggcagagacacaaccaaaaaagagaattttagaccaatatccttgatgaacattgatgcaaaaatcctcaataaaatactggcaaaccgaatccagcagcacatcaaaaagcttatccaccatgatcaagtgggcttcatccctgggatgcaaggctggttcaatatacgcaaatcaataaatgtaatccagcatataaacagagccaaagacaaaaaccacatgattatctcaatagatgcagaaaaagcctttgacaaaattcaacaacccttcatgctaaaaactctcaataaattaggtattgatgggacgtatttcagaataataagagctatctatgacaaacccacagccaatatcatactgaatgggcaaaaactggaagcattccctttgaaaactggcacaagacagggatgccctctctcaccgctcctattcaacatagtgttggaagttctggccagggcaatcaggcaggagaaggaaataaagggtattcaattaggaaaagaggaagtcaaattgtccctgtttgcagacgacatgattgtttatctagaaaaccccattgtctcagcccaaaatctccttaagctgataagcaacttcagcaaagtctcaggatacaaaatcaatgtacaaaaatcacaagcattcttatacaccaacaacagacaaacagagagccaaatcatgagtgaactcccattcacaattgcttcaaagagaataaaatacctaggaatccaacttacaagggatgtgaaggacctcttcaaggataactacaaaccactgctcaaggaaataaaagaggacacaaacaaatggaagaacattccatgctcatgggtaggaagaatcaatatcgtgaaaatggccatactgcccaaggtaatttacagattcaatgccatccccatcaagctaccaatgactttcttcacagaattggaaaaaactactttaaaggagtgtatcttttgtgaccatcagagtctaatgcagaaacagcagtcgtgtaacactccatttcagctgggaatgcttgcattggtttgacactcacagcagtcattatcacctttacttttcccttcagatgggaccctatatttggaggccccatggagagagaaccccaggaacccttgctcgaccttcccagatggccaggttggggacctcctccagccaggtcacactccaggtgtttttctaaatgttgggatgaaatctcttagggtgtgttatcccaggatctgctcttgtcaaagctggtggattttcaacctggagcgagcagtcacagtaacttaaatgtggaaatctgtcagagcgtccatggggctgtggcgcgattggttttggcctcctgccatttcatttacgaggtacttgtatttgacaaacagacctcgtttatgcacagatatcagccttcttcctgcctgagcatcaggcacaagactgcgccctgacccgggtcccgcatctgtcacccccgtggagaggggccgtttctcccaaacacaagcctgttcttgttcgcctggtaaaggggttctgaagcgagggtgttgtggagtctttgagtgtcacacagaaaaatgtccccactcctgcagggcttcagtgcaaggtcactgtgggcagactcaggttctcagaggacccaggagaagtaggtagcgggcagtcccaagttcaactgtgctgcttgagggtatggcctgcaggaggagggttggggctagcttatggggtgacagaggcagccatctaggagaggggggcatggctgacatgctcagggcttcccagggtccctgaatttagaggtctcttcctcccttgccttctggtgcttggctcagggacacccccgtcctccacctgggaagcacgcggggctctccactagcctgggcatgggacgggagggctcattaaccatcctcccttcctccatcccggcctgtttatggattcctgactgagtccgccaggcggcttgaagcggttgtggacagctgggccgcttggcattttatggtgagtggcggcttcccaaggccgtaactgtgtatgcctgtgcgtgagcgcccagggacgtgccttcccccgccaggcccttctgaggggtgccctcgccgggggtgccaccaccctggctggcaagagcagggacagaagggtgggcaaagcaggcagggactgggcggccggcagaggctccatccagaggagaagccccctcatcccatcccaccctagactgatgctttcatcataatgacgcctcctggggagacaccttattgctcttcacagaaacaatctctactgagagaaattaattgttttgttgttgatgggaaaagaaatagaagcagctatttttaagtgttctctctagctgggggtgttggaatcgcaagtcacaggtggctgtctcaagaacccataccctgatagggtagtggaccccatggggtacagctgccctggagtgggtaccttctgcctgggattagttggggggctcctgatggcttgaggcgaggctgcctcattctgggcacacagctgggattaagtcccagctccgtcactaactgtgtgatccctgtacctctgtttcctgatggggacagtgatatgttttcttaccggatgttctgaaaattaaatgagataatatgtgctcagtgtttagctgggaacaaagtaggtgcccagcaactggctaacagtaggagctggatgcacgagaggttttagcagtgggttggcgccggacttttctgtgggtaaggtctaattggcccctgcccttccgtgacccttgctgtgctggtgctgtgcctattaacccaaccagggtgtgagccttgagtcggtcagtcttgaggctctgagcagcctccatacatcggttgtggagtgaggatccatcttcaccctttgatatgctctggccccaccttgagctcaatcagtgcgggtgaccctgagctccccgtcacaccaagcacggcaccaaacccacttctggagctgctccataaacagcgaccccccacacacaggcgcatcctaatgggggccccggcagcatatttactatttacggagcatctgggagataacaacttttatgggagggattttaattagtgctgtggctaaatgcggtggagttaacatgggtggaattggctggtgcgctgacttctgtgagaggcatctggcggagggacgtggccgtatttatcacctggtccctgccactaaagggggtgggagtggagatagtgctgagaatcccagggaagtcaaggccaccaccagggcagccagggcagccagggcggggcaggggctgggcagggcccgctctgtggccgggagctctgtgtcgtcacacagggccatgtacttggcttcatgctgtgctcttgtcattttgaaatgtttaataatttaatctttgagcttctgcttggtgagtgaggtccgatggggcaccggggcattgcaccagcaggggaggtgtgccacaccgtgccatcccctttgcaccatggtgacccatgagcaccacattctggcggactcaccgtgcacgggcattcagcgagactcgatgcgaaggcaaggcaagcacgtgacatccagtactacgtgaggtgctgacagcccccagggggccatgacttgcctttgtttatattttatttttaatttgtttaatttttaacttttgtgggtacatagtaggtgtatatatgtatggggtaatgagatgttctgatatagacatgcaatgtgaaatagcacaccatgaagaatggggtatccatccctcaaacatttatccgttgagttgcaagcaacaggatttccctttgaaacacagcttgcttcgaatgcagagggaaggcactggtaccctaagaaacacaagcaaccatagtaggtgtatatgtttatgaggtacacgagatgtttgggtacagacgtgcaatgtgaaatagcaaagcatgaagagtgtggtatccatccctcaagcatttatccgttgagttgcaaataacatgatttcactttgaaccagagcttacttcaaacacagagagaagacactggtaccctaagaaacacaagcgaccaggaaacccaaccatatccttcttgccagtgttatgtccctagagtagccgatcccttacactggaaatgatgctatgagaggaagagaaagatggggctccccacagtccttcttcctctcagcccttccttgcccatccacaaactgaaggtagagggtatgggcagagtgtgtgtgcctcaggaagtgaaataaaagcagttgtgttcattctgtgcagccctcccactgttctgaatgaaatacatatgaatgaatgagctagaaaaaagttgtgtaattttggtgattctgctatgagttaaacacttgtatatttgtatttaaaactggcatggcacaatataatgatgaacgtaaaactcatgctaataatgtagagtttttatttttctttattcagaatggcttcaaatagtaagttaaaaacaccatgacaagtctagagaaagactggaagaaaaaataatgctttatattttagcgcctttcccagcatttctcccttgctttttgaacaaggggttcttacttttttttttcttgagacagggtctcactctattacccaggctggagtgcaacggcgtgctctcagctcactgcaacctccatctcctggggttgagagattctcctccctcagccacctgagtagctgggactacaggtatgtgccaccatgcccagataattttttatatttttagtagacacagggttttgccatattgcccagactggtcttgaactcttgagctcatgcagtccacctgccttggcctcccaaagtgctaggattacaggtgtgagccactgcggcccggctggggttcctgcatttttgttcatggtggggtctcatctgtgatgcagctgtccctgggtgtgggactccaaggggctttggcttgaggagctgtgaaagtgtgaatcttgcagtggccaggtgggataggaggttggtagtagaataataatcgcagtcataatagctgtctctgtttgcatttcccgtgagtcaataatcgcagtcataatagctgcctctgtttgcatttcccgtgagtcaggcactgtcctaagcaagtcacatgggttatctcattccctcctgcaaaccccaccaggtactttgtttatgcgcccattggacagatgaatacattcaagtccagagaggttaagtagcacagccaaggaggttctcagagcccagctggagtccatagccagccagccttcttggccaccttgtttctctgccaccctcattttgctcattttaggggatggaaaactgaggctcagaagagcagcccaaaatcatgactcgacagggtaggggcaggcctggaactcagtctccagccctgtggccaccagggctgctcctccctaggccaccctgcctcacccatgctggaagcattttccttcttcctctgaaaaggcaggcgtgtcaccattcgtcacagtgggctccagtattcatgttagtaacccactgagtgactgtctgctccacattccttcttgagtgatggctcaggacctcagcatagctctctagactcccaacgcccaccacacaagggcgccagcattcagaaacacgtatacgcctggacagacgcacccatagctgctcctgcacacagacacacagaaaggcgcaggcacatatgcatacacacacttgtgcacagacaagcaaaaacaggcatgcacaatgacagtgctcggatgcgcagacatgcacagactcgtgtacacacacactcctcagacacacatgtgcaggcctgcacacagacctgtgcacatggatatttatgggcacatgccaagggtacacaggctcacacacgagctttcacacacacatgtgcacacaggcggtcggacatgcccacgtggacacaccacagaattgactcaaggccacttcaacattgccagaagtcccagcaactcagtctcacagaactggaaccatgggtgttggcttgtggggtcaaggggctaagggggtcatcacctaaggtttgttggcacctcttccacatgtccttgcagggatccctgtgctggagggattgaggtaggagagagggaagcatggcagaaaatgatcttggggtcatgtggaaccccaagtaagggtggccaatttgtgggcaaatgtttgttctgtatttaagatacatgtgggcttagaaatcacaaagtgataagtgcctgtgctgcgtgccagctttgtcatccacagtcccctaagaagctccccactgggtggaaggggacacacagttgcaaaatgctggcaggcatgacgtcaccagaaatgcgggtcagaatggagagaatgtggggccagaaggggtcagggaaggcttcctggagggggagggcttggtcagagcacaacaaggctcaccgatgctgttctgggcttttcctttctctacctcccttcataataaccagctcacttggagccaatacacacagggaactcgttatgacaacctctgaggccgtccagggcctttactcctcccactaccctcctctccctgcccaccacctgtaggtaggtctcatttcacctctgtcatccagatttagaaactgaggctaagaacgtctccagtctgaggtctcaggtgggagaaggagtggcaggaccccaatccaggaccatctgctttccaggcctgcctctcagccacctcagttttcccaccgtgtggttggaggcgttgcttgggcccccacctagagaaatgggcgcagagctggctctgcatttgaaaggagtcccaaggccctgccccacacgcgctagctgtgccaccttgacgtgtgggtcctgtgtctggtctcagagccctcgtctgtaaaatgggtgtgagaaatggataaaatgaagcaggcaacgtgccttgcacagggactggcccaggatgcgtgtctagtaagtgtcagtgccaccatcactattgctgtgatcgatcgcctgtcactgctggctcgtccggggttaggacataatcggaaaatgagaattccaagtcggatcaggaggagtggaaggaggaggctgtgactgtgagcccagtgagcacctgattgcaggggtcagattagggcagaggctcactgtgatcctgttggcctcccaaggtcagcctcgcccctatggtgccaggcccattctttcctgctccccgtttccacagctctctaggtgtaacccagccctggctcggagcgacatgggctgtcactgtgtgaccttctgcatgtctcccatcctctctgaataccaggtttgtcctctgtgcaatgagaataacgtccaccttgaggtggtttctggagttcagatgaaagaaagcgtggcagggctttgaaaagggctacactgtatacccctgctatgcaggaggacacggggtgctgaggagggaagtggttatggcgcccctccctgtccctgctcctccccggggtccctgcccctccacatctcaggagagctcagatgctttgccagccccgggagggtggcattctgcacccagtagtttccatggtgaaaatcccagttcctgccattttgcaacccatctgacctaatttatactttatcatttttggcaattttgtgacttgggttggggagtgggcggtgttgagagcactggctctgagtcatcctcattctcctccggctgaaattcaagtcatgatctaccacatgcacacacgtgtgcacatgggcaggcagggaggccgggaggggaaagtggagaagccccaccatggcaggcatttgtttttctttcaatctttatattcttgctgaatatacgtgtggagagagttgtgaatttttatctctgacctttgtaggcacaaaatcatcccattatcatatacctgtcagaagacaggagagaatcagaccgtattctttgccttttatgtatcaaaaaaagaaagagaaagttattagcgtttttccaatccagggattcaaaaaaaccagctacttctcggccaagctccctgaagcagaggttgctctctgctggcctcgtcacctgctcctggcccagcccagccaagcagcaggactcacagctctggcccatcccctatctctgggcttcctcagagagggtgtcctacagtggtcagcatgcccgcgtggggacaggagcagcttctctgaacacatgtccccagtttctcaatgcccctgcagagatggaaccttccaggtgaaagctctctttcccctcagagtgatactaagtagcaatttaaaaacaccatgacaagcccagagaaagagcagaaggcaggagaattctttagtttttattttttagagacagggtctcgccctgtcacccaggctagggtgcagtagcgtgatcacagctcactgcagcctcaaattcctgggctcaagtgatcctcccacttcagcctcccatgtagctgggaccacaggaaatgtgcagccatgcccagctaatttttgtattttttgtagagatgcggtcttgctatgttgcccaggctagtctcgaactcctgggctcaagcgatcctccagccttggcctcccaaagtggtgggattaccagtgtgagccactggacccagctaggaaaatacttatttcagtggctttaatggcatttctcccttgctttttgaacaaggggtcccacgttttcattcttcattgagtctcatctgtgatgcagctgtccctgagtgtgggatcccagtgggctttggctcagggatttgtgaaagtgtggctcttgcaatgggcacgtgggataggagggtggtaatagaataatgatcacagtcataatagctgcctctgttcttgtttcccatgagccaggcactgtcctaagcaagtcatgtgggttatctcatttacaaacctcaccaggcaggttcctttatatgcccatttgacagacgaatacatttacttccagagtggttaaatagcatggctgagaagcagctgagccagtattcagggcctggaatctcaaatttctcatccgtcaagtggacataaaaatgatatttgcttgggaggccgacgtgggtggatcacttgaggtcaggagtttgagaccagcctggccaacacagtgaaacctcgtctctactaaaaatacaaaaaaattagctgggcgtggtggcagccacctgtagtcccagcttctcaggtggctgaggcaggagaatcgcttgaacctgggaggcggaggttgcagtgagccaagattgtgccactgcactccagcctgggtgacagagcaagactccttctcaaaaacaaaaaacaaacaaacaaaaaaacaaaaaatgatattcattttacagaagtgctatgaaaaagggctgaaatatgtttgcacagtgtcaggtacatggttagtgctcagggcgtgtcatcatcgccaacaccctcattattatcactggaatcattactgcggctgctactctggcagcccattcattccttcaggccacacgaaaggagagtgtgctaggtgccaggccctgtcacggcactgaggacagagcaggaacacagcacaagccctccttgtacaggtctgtttgtacaggtctgtctgtgctcgccagggatttacttcagccctggtacatgcccccagctaacgcttccaccttacagagggaagagaaatgttcctgcaagcatccttccagtgcctgccaggcattctcccagcaactctgccttgatccccaaatcccagtccattgctgatcggcctcagactctgtcctgcttggtggggcctctggctgtggtctgccctaggtggcctgggctatccccgggtgggctggggaaggccagaggggactgctgagatgatggacatgttctttgcagagcacgcagcatcagggtctgaatctggagaacctgggagctgggactggcctttagcacactcagacttggcaggtggatagagcaagaggagaaggttctgggaacccagtaaaggctgggggtgaggtagaactctcacctccagaggcacctcctcagaaggtctggggtggccacagtaagtcctgccccctctcatgctgcctgcatctcccctcaatgggatcctgtctttcctgcctcccccataagcatccccagccctgaagtccctgaggcctgcaggctggcacatctctgctcacccaccccagcccaagccctgagacaggactctgcagagccttcatgtggggcagcaatcagcctcatctctgacggatgtactttagcctggaagcctctatgcatcctgtttcacagacaagcatctaacctcaaaaaaggcagggatttgggtgatgctgacgataaagtctaattttacctcaataatgcaagtggctctgtaattccatataattatattaactggaaaagcgaggcccgccttcgatagacaggactcgattatctttgcaggcatggagtatgctctttaattccctttgcccgggaaggtctgccttgcagctttaaatccaaataacgacagcatgctgttggcattcctacgaccacttatttgttgaagcttttacataaataaaaaggggtgctaaattgggagggcatgcccttaaaggtgaagtctacaggtctcagagctgctgcagacgacgggggctgaaggagctgcgggatgtccggggagtttccctaagctgggctttttcatcatctgcctgacattttaactctccttccttctcctctcagttcctctgaaccgtagagcccacatgcaaatacaacagataatgggcggcttgggtaatttagggtgaacagtaagtaaataatgagaaacttgcattttgtaacatctgtcatctttcttaagtttcatttattttacgcctcccccccaattaaaaaaaaaagacccccataaataccgcagcgcctttggtttagagatggtttgaatggggagaacagctcgaatgcactgttttttcctccaagtaaggtactataaaactgtttataaaatgaaactaatgagatttggagcacactgttacctgatattaagctgttttgatgagtgaggcaaattgctgtggttaacaaatgtaaaaccatcacttttattgatacaggtttgtgtatgtgtgaaattaatcaaagcgtgggcgatgatgaacagtttctgtagaattctgtcaaaggttaagagctagttatttttaagaatgacatgaatctagcagagacagtgattgcctaaatgaccattgtaattaccaattacttcttgaagcagagaatatattcacggcgtgcagtcctctaaatacagaaaggcattagcccatttacgtactaatgcacataatttagctcctgaaaagggcagatgggagcacaatgaaagatataatagataccgcctaatatcattccctaagaatattggattcatcaaagatgaatattactttatgtcagattgttttttataaaccagtcaaaatatatttcatctcatttttgcacgcggtatcagggtgacaatagcaacatcacctttgtcatcaaaatctggccagctgtgggactaggcagacagggtgcctgatggggggcgtttcagccaccctttgtaagccggtgtgtaactcacaggcaggataacttccaggcaggggtgattaattttatttcctttggagtcgatgtcagtggaagcaagagagacacaggttctcagacaggaggatgggagcagggaggtctgagtcgacctcctttcggaaaatgcatcatctgaaatgtcttccggaaggcgacctcctccccagccctgggttcctctcctcaggtgttgaaaatccaatatccaggtatatggagaaggaggagggagccctttctgtctgcacactgatcttaatgccatatttggattgatataatgatagcagagatcttgtttcccaatgttgcagaatcaatgtaataacagtaacagaaatattatttagttagtgcagttctgctggcataatgtagtcacgctttcagcaaaatgatggaaaatataaacatttaatcagcccttattcacaaaaaagcctaaaaattaatcatgtttaaattctgtgtcttcgggaagcaattcagatgctaagcaattcagattttttttaatttttatttttcttgccttttttttttttttggatgcgcagtcacagataacctagtgctgctctcaattacagtctccttgggagaggctgaactgcctggcgcctgccaagagatggtgactccaagctgtggatttggtctgcgcccctccgagtgggtttccagcatgcgtctgattctctccttcatgtcaccaatcaagggcaggaggttacacaataccctgttaaaacagccagccacctgctccccgtcctgctgagccaggcagtggggcacgcgggtgtcacagagaacgtcagcgccgcctgaatacctactacgcgccgggccctgtgccaagcgaggactcggccctcctctcaatgtttccccaaggtcatgaccaggattgcttcgtcttgagtcctgagtccctcagaacatatgggggttagaaggagaaaggagagaaaaggaggagcatcagagagggaggatgaaagcggggagaaaagagaaagaggggagaagagtggagtaccagatccaaggtcaagcttcagggccaggtgaccttgagaatcacttcccctttcctggctaggattcctgtaacatgttaactggggatggtgattcctgccaaatggcccacgctggggctgggagaggccccagggagccagtgcaggcaactgggcttcacatgaaacccctgcatggcaggcccctccttctgctctgggcccagctcataacgttctcctttgaggggattgtgtgcctgcccagcaaaaacgggagcttccgtttcattctctgcttgtactgtgtggccttccctgtggggtgttttcttttggtcttctccttagaccagtggttcccaggcaactggggccaactttacacttccatcctctgggacatttggcaatgtctggagacacgtttagttgtcataagtggcaggtgctcctggcatgcagtgggtagaggccaggaatgctgaacatctggcttaaaatgtcggcggtactggagctgagaaatgctcatctggttatgatggcatggccagcaggtgccaggactgtgccctgactttgctcatcattcgtcccccagcacccagcacacctccacctggtacacagcagtcagggaataaataacagttgaatgaatgagggaatggggttcagagggtgctggcagggctcctattgggtgagaagtcggtctcctgcctgccttgagactccctggaagggacctggacctgctggtctctcttgagccaagcccatctctctgttcccagccacataatgggctcctaacattcagtgggctcccagcaccccagcagcctcaacttgctggaggatggccgcagtgctctagacctggacttggcctggcccggaggacacctgcagcctgggcaggaacacctacccatccaggtgccctgggatgcttgttctgcaggtaatgtccggattaggctcggacctttggacagaccactttcagttggtggtggacaccttcccctggtggacgctggccgcttggcaatggaaggagaaatgcgaatactttccctgtggcccaacctgggcagcctgtcccaggaaggatgctagagaggctctctatacctgtccaagactttcccagcgaccctactcccttgtgtagagcaatggaagcctacttgggggacaggagtacccttgttttcagaccctgcaggtccccgagaagggtctgtgtcatccttaagctgaagctggacccatttctggcccatcactctgtctagtgagacctgagaccgatggacacagcagggccagggtctcctgaggtagagtgtatgttgggggagagccagggggaggaagggtgagtgggagatcactgctgtggtttgaatatgtcccctccaaaattcacatgttggaaactcaatctccaatgcaacagtgtggggaggtggggccttttggtaggtgtttatgtcaggagggctctgcccttctgaatggattaatgccattataaaagggtttaggccaggtgcagtggctcatgcctgtaatcccagcactttgggaggccaaggtgggtggatcacgtgaggtcaggagtttgagatcagcctgaccaacatggcaaaaccccgtctctaccaaaaatacaaaattaaccagccatggtggtgagcacctataatcccagctacttggggggctgaggcaggagaattgcttgaacccaggaggtagaggttgcagtgagccgagattgcgccactgcactccagcctgggcaacaagatggaactccatgtcaaaaaaaaaaagtgtttggtggagagaatctgggaatctggcctctttttgcccttctgccttcaccacgtgaggacatagtggtcctctccactggaggagacagtgttcaatgtcccatcgtggcagcagaaagcagccctcagcagataccaaacctgtggatgccttggacttcccagcctcaagaacagtgagaagtaaatctctgttctttataaatcacccagtctcagagacttgatgacagcagcatgaacagactaacacagtcatgttactggtgcttcaggctcttggggaggggagtctgggtaggcctgacagaggagtggggggacatggggaatggggggcagcaggggtaaggcccatagactccattgggtgtttctctttatggccttgtccccactcctctcatcaccgaggatccctggacacccaccaggagcttccctcttccctggggtccaggcagcagctcccagcatgggcagtgtttcctggacagatgccacttttttttttttttttttgagagggagtctctgtctaggctggagtgcagtagcacaatattggcacactgcaacctctgcctcctgggttcaagcgattctcccgccggccagttttgcatgtctaggggccccttgcagagaagggcaggggcagcacagggaaccctagactggggcctgaagatgaggccttgagtctgtcatctcccttcatgcactgaacagtgcagccacccagggcacggctcttggccgtgatttggggagcgtgacaagacaagggcgtcaggacttggccacctggaagggctttgcttttggatatgcagggaattccctggggcagggcagaatgctacccctcagctctccctcatgggagaccctggcaatcccgagggagaaggcgctcagcacctaatttacttcctctaactgccctgaaggcctagagcaacagttaagaatcacattaccgccttttattgtctctaatttttacccaaatgatttctgctgcaccagcttaaacaggctctcatttcccttcctgctgctgtcatgctctgggtgtgtgcatttctgaaggggtcagcctctgaatgctcttctccctcaatgcaagatgggccttctgtcctcctctcccctccctgggtgggagtaggggcaccagggcaccagggcttactcctgggagggagccctgtgtctatccagcaactgtttgtgcatgtgtgtggggggaccctggaaagtctgcagggtgtgtctgcccatgcgccccctccctcctctgaacctcagccctctgccctggatctgagtctagggaagccagacctatcaagctgtgtgacagtgccctttaaccagactcctttggtggtaagtgacagaaacccagctgaaactgaatgcagaaaaaaggccgggtgcggtggcatatgcctgtaatcccagcactttgggaggctgaggcaggcagatcacctgaggtcaggagatggagaccagcctggccaacatggtgaaaccccatctctgctaaaaaaaatacaaaagttagccaggcttggtggcggatgcctgtaatcccagctacatgggaggctgaggcaggagaatcgcttgaacccgagaggcagaggttgcagtgagccaagatggcacctgggcaacaagagtgaagctccatctcagaaaaaaaggcggggggttgcaggtactcttttagtactcatggagctgagcctgggaatagactttgcaccatgcacgggtggatcagagatatctcgggaatccctctcccccacttttcagctctgctgtgctgggcacagacttgcctcctaggcagcaaagacagtgcagccagggatgccccttagttgagcaggaaacctgcttcccacagggcccaagaatgatcctgacatctcattggtcaggctctggtcacaggcccaccactgagtcaattgctgtgctggggacgatgcctggggtaaatagtcagggctgggccatgttcctctcctggtagcccatggagtgtagatgggtttgggcttaaccaacccacatggaaaggagcaacttcctaatgggacacctaggagctgtgaccacagttaggaacagatctctgctgctaaccttggaggtcccttccctctttcctgcctcagcctccatctctatgtccagggctgggtgagagaattggctctgcaagtgaaaccatccccacatggttgacaagaattacaagccaggttctgggcagaaatataattaagcatcagtcaggctgccctctggcacacttcattgttgctaaaattcatgtagcactagatactgaccatttatttgcacgcctattgttcccatagatgggatttcagacattagaatcatacagcttttgtctaaggattctgtaagatgtgtttcccacctcgaactccagcaccagtttgaagaccccacggaggatggggatcagcctgagaacccagctccttcctctccctgccccaggacttcaccctgcatgcttccactcatcaacaatctccatactacacccattccaaaacccttacaatctccagccccaaactccttggggaaacggattggaggtttcctctcacctccttattctgtaacccgatgattagttctctctttctgctgcaacctggtgtctcggcgtgctcacttgctgtgagcagcgggctgtggccatcatggttacacgggagcacctggaagatgctgttgctactcttgttgtcttattttgtccctgggcagatgtggacaggagaacgctggtgggagtgtcaggcatgtcctccggctttctccccgcctgcagcatctccctccccaggagcactggccaaagcctgccacttccatcaccacactgtctagagagttcccagcccatgtccttgtaggactttctcagagccccactgaatggcaggaaagtttttatttccccaagaccctggaggtgtcggggcctcagaggttctgtgtgggaagagagaggacttttctgctgtaaaagccagaccaggcagctgcatggtgctcctgcctcatggacattcaaataccttcttggaccctcgtgcttttcagaaaaaatgaaagagcttgaggactggaaagctgggaagctggaaagacagagagcccatgcccatcatttctaagtgaggaagcagaggcccagagaggttgaggactttaccagagccgctcagcagtgacagagtctgcatctgcccagtggccagtgcagagctgggactggagcccaggtttctctccttgggggtctctgaaagactcccaaggcaggctcggcttttccaccctctttcctcctccattgctcaagtctcctggtgtaaacttggtctgcttccttccaatgctcacccatgttcttattcctaatgcctgcactgtcactgccttggcggggacatggagactcagtgacacacccttaggctggggctggagagagcagcccccctgaaggctcctgccccacaccagcctctgtgtccttgcaggccagtatggtcagaaaaacccagtcctggaatcactgtcttcagaaccacagggaccagggaggcagccgtcccccgggaccactagctgcaggcctggaggcatcctgctcatgtgagttggagagagctcaccccagccctgccaagcccctcttcttttgaaagaagccaaagtgagcggtgataaccatcagttaattatcgaaggaattctatgcttcataaattgttttctttctgagaggaaaaggaaagtctactgaaaatgggattttagggtgtgtttcaggcgaataggatgatgtgggccttcttctctaattcttatccagtgcagtgttcaccaggctcccactttcacaggtcaccatggcaatgggaggacatggagcagggcatccctggaaagtgggtttctgagcccatgtgctcattgccaggcccctgcagggcgagccccatcagctgtcttcctgcttctccttctggttcatcattcttactactcatgagcaccgactctgagcctggcactggactggtgctttccagaccgtgctgccctgagaattgagtgtgacatcatgaacgcctgttcacaggttaggaagctgaaactccaagattctacagcatttgtccaagcttccccagggagtcaatggccctggtcgcctggctccctggctcttgcccttaagttctgtgccttgctaggcaagaacatccaccttttatagaccaggactccggccttccagtgctatcagcacacccaggacaaacatggggctccttccctctttcccttgcgtgtcttgttggattaagatttatttttaacccagagcaaatctggggagctggccaccctgtcagatgccattggctggatgcttctctttttgcaagagaaatggctgactgaggacctgcagccagacctgggacatgttgtccaggacctggacttcatgttaatggcatcttctgaaatgacagagcagcatcattactcccagtcctattctaaaaatggacccatctctaggtcaacatcctcagcacagttcccacccacttgctgatattgtcaagtgcattggctagggttgtataaggcaagggagtcagaaggagttctttctccttctctccctccttcccttcctttcttccttcatttctttaatattatgcttgtgacaacaaaattaaaatttttttgtgtcacatttttcaattgctatccattcatccatccatccttccctctgtcaattcatccatccatccattcatccacacatctattcatccattcatccatccatccatccatccatccatccatccatccatccgtcaatttgttcatccatcaatccatccatccatccatccatccgtcaatttatccatccatccatccatccgtcaatttgtcatccatccatccagccagccatctgtcaatttgtccatccgtccatccatccatccatccagacatccattcatttacccatccatttatccacccacctatccatccatccgtcaatttgtctatccatctacccatctgtcaatttgtccattcacccattcatttatccacccacccacccatccattcatctgtcagttcactcccatacattgtctgtcagtccatccatccatccatccatccatccatccatccatccacccatcaattcacccatccatctgtcaatttgtccatccacccatacacccatccattcatccacccacccacccacccacccatccattcatctgtcaattcatccctcatatattgtctgtcagtccatccatccatccatccatccatccttccttccttacttacattttttttttctttactggatgtttatttacatcactgctccctgtgggcaaaaattactcaatccgttgagtctgtgtttagttgccttgaccccagccctaatttcctgttcacttttatatgtcacttctttggctggatggacagacccagtgggtcatgaattgcccctctgcaaggcatccttctcatatgcagtgatgacatagctcttcctctcctgagtcacggtaggtgaatgcctccaggctatcattctctggatacatgtggctctttgatcttgagcaaatttacaggcccctaaaagaactggtttgtctgaggagaacaaccaaggacagaaaattgagtctcatccttgagtcaaaatgcagacttcctattgaaatacaaatccatcgtttcaaaaggtcagctgggatggtacttaaaaaaagaattgcagctggttgcgaatagggcactggaaacaaaaacgtcccatccaagaatactctttggccctgtgcccacagcttcttgtgattgtggcttggccgcattatcattctctttcagttcctgtcactcagacttgcaagcctggagagagaaggccagccagatagatggacaggcgatgtgcaggcaggtggcctctctacctaagtatacgttctcagggtgtgggcatctcagcatagagccagctgcccttcaccagccccattcacattcccatgtccccgggcccactcagccttaccttggaacatattctatttcttagaggccaagctttggccagaaatgagtgtcccttacctcctccacaccatgtttcacttccaacgaacctacaggcctgaacaaaggtcctatctacttccccaagggcacacttgacattatcccacattcccatcccttccaacactcaactgagccttcagcttttggctctgtccctgaaatagtttggatatttatcatctccaagtctcatgttgaaatatgatccccagtattggagacggggcctaaggggaggtgtttgggtcatgggggcagatccctcattgatggtttgatgctatcctcatggtaacaagcaagctgttactctgttagttcacacgagatttggtcgctaatgagccaggcacctcctcctctctcttgcttcttttctcaccatatgatgtgcctacccatcatttgccttcacccatgactggaagctccctgaggcctcaccagaggctgatgccagctctatgcttctggtacagtctgcagaactgtaagccaaataaacctcttttctttacaaattaccccagcttagggattcctttatagcaacgcaaaatggtctcacacaatctgcatggccttctgagactcacccagtgcctgggcctgcccagctaaggttggaggaggggggagacagagaagttaccaagtgagctcatttgcttatttactgctccacacccaccttgttcccaaagcatttaatgcagatgacaaaaatacatacagcacaatagtatgaaaatagaaaagagatcaaggcaaagggataaaggcaaaggagtgaacggtgaaccaaggccagggataaagtcaaactatagaaacttacgctttagaagtgggggtggggggtgaagggggttccttcaataaattccatatataaatttctgaattttctttacaataggaagagctgactccctgcaaacatacactgttttgctttagggaaggattttgtcaaaggtgtgtttaaagggagtctccttaagtgcatttgaaggaagatatggtttataacaactccatttacacagaactttgtcaacagcggtcagtggatagccctgtctgtggatccctcgtggctgtccctgggcagactgtaccacctggacagcagctgttcccctcaccggcattgctaagcaagtcagtgagttgacatgatggagcactttccaggtgtcctcgcccaagggaggtggcaggaggacagggacacagaagattggagcacgtgcccaggagctgagtgagtggtgctgactttgagctcaggcatcctcagtaccggaagaacaaggtgaaccactgcactatttaagaggggaaattgtatagtgcctggccatcacgacacggatcaatgggacatgaccactccctggtggcctgcatttgggacccacctcctttggggcctggctggcctcatgggttggtcagcctgtggccaggaggcgctcactgccacttattgaatcacatgggttgaatctgctctcgcggagctctgggtccccacgggcagtccctgaccccaggcaggggacagagggtacccagcaggatgctgcccctgccttacatggaagccatgcatctggcctgttccccacattctgtgtaacaggaattctacttggatccaggaaggaaaataaaagtgttttttgttttttgtttttttttttttttgagacggagttttgctcttgttgcccaggctggagtgcagtggcatggatcttgactcattgcaacctccatctcatgggctcaagcaattctacttcctcagcctcccgaatagctgggattacaggcgcctgccaccacccctggctaatttttgtatttttagtagagatgaggtttcaccatgttggtcaggctggtcttgaactcctgacctcaagttatccgcctccctcggcctcccaaaatgctaggattacaggcgtgagccaccacgtctggcccaaaagatgtgcatttctgttttctcacggaaatactgtttaatggatctcttcctatgccctcctgtctccttgcctctctgttcctccccatcacctctctctcttcctctttctttctatctcagggtgatttcaaaaatcccagaatatgtcaagaagcctttaacaaggggagagagaattaagccaaattaattacagcaaaataagtggaattaggcttaatttaagtaggtaacagaaaagaacggagctggtcttttccccttcttggaaggagtcctttaagggtttttttttttcttttttttcccaaatggaagggtaacatggctgcttggctcagagcagcgtgctctcctcctccggtttgccctgttctcctggactgggattaccggcttgcaagtcgctgaccgtggttgaattttatcattattaaggttcagtgctaacctcctccccttatttccttcccatttaaagtttgggggataataaattcttttgatttagcaattatgggagcacagaattagtcaaacgcgggctttgagaacaaagtagaatggggacccggtgggcttttgccgagaagccacaaatactcacaggcttgccatggaaagatctgggggaaatggtgctttgttaagtctgaaattggatgggttttaatttaagagcatagctccaaccctcacctctctctctaagcagaaaaatagttatgtttgtgggtgacatattcctgaagtcaattgcgctaaaccactgtgctgaaatacattatattgacttgtctggggctgtgctttttcgagtacaacattgagttggctagtaataaaaataaataagaattatatatcatttcattcattgttttggtattacagatgcaaaatgcgcaaagatataacacaacatgttgcaatacacttttagaaaatacaatgataaaattaatccttgatacggaatgatgtgtgtgcatgggttaaggcggaaggcagagagaagcagtgggtgcttggaaggtgcagccaggtcaggtactggactgacatccgtgttctgggtgggtgggtggaggccagaaggggcttgtagtgccccccactgacaaggagaagggaccctgcctgcagctgatgtgtggggcgaccgctgccctctctgggcaggctggagcctgcctggaccccttccatcgatgatacttggtcagcttgaggcctggtcccccgggctgggccctgttaggaagagagatagctagagtgtccctgcccactgcagggtggggttggagccaagtagaacaagcatttgtttgctgttggtttcctttgtctatgaagcagccctgagctggaacggttacagtggggtgtagacaaatggggaccctagtcccgggatcctcaggttcactgaaagtccctcagtaaacacactggaccgttcacccgccagtctctgggctcagacctgctgggggtgggaagcacccactggcctggagaacttcagggtggaggtccaagggggaggccctaaccccaaccccgacctttaggtaatccagtctcttagtctgacagcgtggggcagggagagcccccagaccaatcccatcactgggctctggattctccccgtcaccctccccagcatctgccatcccagacgcatgtgcgcacacgtgtggatgcaggcacagatgaaggcatacacacacatgagcacccaggagaatgcacacatatgaacatatacacgtggacatacacacacatgagcacccaggagaatgcacacatatgaacatatacacgtggacatacacacacatgagcacccaggagaatgcacacatatgaacatatacacgtggacatacacactcatgcatgtagagacatgaagctgaattctcatgtgtgcacacacgcacacatacacacatgcggagacacctacacacagaagacctgtccatcccattcttaaggcttctctgaggtgggacaaccttccccttccccaccaccgcaataagggtcccagtgctgtctcctcccctgccctgcaccctcctccctggacccagccccaaccccagcttctcggcagccccagctacccctggcatctctggtgccctctctccctcacaggcagcatgacctctgacttagcaccccagtggctccccactgctctgggcatgaaacctcatcttcacctccccaccacagcccagtgtggccctggccttccaaccctcttccctacacgccccctgctcccggctcatcaccacaccagcgtggggctctgtcccatcctcatgaaggcccatgatccctgcagagctcagctgagcgctgcccccaccaagccccctgctgtacctcactggtcccctccgccgtaaagctctcccacagcggcagctaccaaccctccttacagtagcctgcgtgattattccattacatctgactctccctccagactctcagctccatgaaggcaggggcctgtctgtttgctgtctgccgtgtctccagccacaccagggttcaatacctttgctgggtagaggcgtcagtaatctcactgcagagggatgcagtctcccagagtctctccccctaccccagccccctcctatgaggacctgggagagtcttgcttttcatagcagaggctgctgagcccctgggcagtcacctgggatgagaactgtgacctgggatgagaaccctggtgtcctgactcctggctggcctcggagactctcccactccacccctagctgggcttgccggcagcctctgagggtcttcctgaatgactagaaggatgtcccctgcaccctcccgcagcagacaccagaccctgctgtcagcgaagggaaggaaggcaggcctagaagccagcatgtgagtgtcatcgttgtagggaagggatgtgctgccacatggagaccctgccactcactgcccttcctgctcagagggaggagggagctgagatagatgtgaagcaatggagtctggaacctggggacctaggggccatggggacagggacagtggggaacagagccatcagctgcccttaacaaagtctgtggtgggcaggggtagaggccctttctgccactctcccaccccagggcccagcagacagagagcctgactggttcctctctgtgcatattcggcggcagaggtggggaaaaggtgggaggggaaccctaacctggaggaagcagagtgtctcgggctggcggtgggcccgggagaggcacgggaggctgagcaatgaggaggccctttcctttcacatggcccatcagctgattgtcccctggctccctctgccatggcccagggtggctacctctgctgcaggcagccatggaagcttctcagaggctgcctgctgggtgctggcctggaccccttccattgaggctcctcagctggctggaaccctggcctcctgcaggctggaccctgttgggaagagagatggccagagtgtccctggccactgggcaccagcaggggcaaaggatcccagtttgagccaggcaggacaaacgtttgtgtgtggttggctcaggcgggctccacccccaaaccctgctgcatggcagggcatgcatcttctcggtgaccttggtgacctcaggatggggacagtgcctggaggtctctcacccaaaccaggctgcaggcactatggcttctccaccctgtctagcctggaggtgtttgcacgggcagagccttgagcttcccaggctcatccttcagaaacctccccagacctggtcccgatctgcccacaccttcctagctcacagtacagcccagcatggagcatcccgcttgacaataatgtgtttattgggtgattacttgacaagactgtgggcttttcaagaacagtcttctctgatttggtcagcttagcacccagcttggcttgccacatgtgctcattaaaaaccactgattccattaatgattatgagaagaatgtgcacacgtgcttaagtgtagtgtgtgcatgactgtgagagcgtgtgatcgagtgcacacatacatgaatgtgtgagcacgtgtgcacatttgtgtgcagttgtgcatatgggtatatgtgtgtgcacatgtgagtgtgcggactcagcacgtgtgtgtctgtgtgagtgtgtgggtatagcatgtgtgtgcactgtgattgtgcatgcgtgtgcatggatgttatggactgaattgtgtgtccctgccctagttcccagtgttctggtattaggaggtggggccttttgggggtgattaggctgagatgagctcatgagggtagagccccaggatgggattagtgcccttatacaaagaggaagagacaccagagctctctgtctgacccccaccccccatatgaggactcactaggaaggcagccgtccacaagccgggacctcaccagacactgcatctgcagcaccacgggcttggccttccagccttcagaacctcgagaaataaatgtctgttaagaccccccagtctgtggttcttcactctagcagccctggctgactatgaaagtgggtacagtgtgtatgtgtgtgtgtgcatgtaggtgtgagtgtgagtgaatgtgtgtacatgagtgaatgtgtgtaggtgtgagtgtgagtaaattcatgtgtttgtgtgtaggtgtgtgagtgatgtgcgtgtgtgtaggtgtgtgagtgaatgagtgtgtgtaggtatgtgtgaatgtgtgtgtatgtacgtgtgaatgtgagtgaatgtatgcatgtgagtgtaggtgagtgaatgtgcaagtgtgtgtaggtgtgagtaggtgcgtgagtgaatgcatgtatgtgtaggtgtgaatgagtgaatgtgtgtgtaggtgtgtgagtgtgtgtggtgtgtgagtgaacatgtgtataggtaggtgtgtgagtgaacgcatgtgtgtaggtgtgagtgaatatgtgtaggtgtatgagtggatgtgtgtctgagtaaatgtgtgtgtatgtctaggtgtgagtgtgtgtaggtgtgagtatgaatgtgtgtagatgtgtgaatgaatgcgtgtgtgtaggtgagtgtgagtgaatatgtgtgtgggtgtgagtgaatgcgtgtgtatgtgtaagtgtgaatgtgtgtaggtgtgagtgagtgtgtgtgtagtgaatgtgtgtgtacatgtgagtttgagtggatgtgtgtaggtatgtgagtgaatgcatgtgtaggtgtctgtgagtgaatgtgtaggtctgagtgtatgtgtgtgtgtgtaagtgtgaatgtgtgtaggtgtcagtgagtgaatgtgtatgtgtgtggtgaatgtgtgtgtacatgcgagtgagtggatgtgtgtaggtgtgtgaatgcatgtgtgtatttgtaggtgtgagtgaatgtgtaggtgtgagtgtgcatgaatgtatgtatatgtaggtgtgagttaatatgtgcataggtgtatgtaggtgtgtgtgtgtaggtgtgagtgtaagtgaatgcgtgtgagtgtgtgttcagagtgttcccagataccagatgttgaggagggacctccctagggcagtggctctgagttctccgaatccaggtctccctccagagtcccctggggtctctgagcaccgccctgagcaggttttcaggccagtgaggctcactgattttccattctcagaactgtctgaaatccacgaccagcaactctttgccctgggctgccactggttccacatcaccatgttcccccagtcccctactgtgacacccagtggctgctcctgcgggtggagcctgtggtgtccaggagagtctgggagctgtggggccactgcagtcttttacacagagtccctggggagacagctgtgcttctacttaacagcctctgctgaaggcccacgggtgccaggcactgggctagtttctgagagggagccatcccagcctgcctttggggtatccctgacagagatttgaaggggcctctgggaggtaggaggggatattcccagccatggctagaagctgggagggcctgagtgcgttggggagcaaaaaatcaggtgccctgttcacacccctgcagtctctaagtacagggcgtggggtgcctctgccagagtggacccaagggagcacctctgccactttgccacagagccctggccctcaggctgctggaaggggccaatgcattggcgacaggatgtgggtggcagtgcctgggagaggtgaagctgccctgtggaggggctggagcaggagaagggagctggtgacattaagcagtagccacgacaggtgggagtgagctggagggcttctgagacaggctggtggctcccagagacacactgtgcgcaggtggggggcatgcggtaggtgggagccctgcattcccaggagtgtatatgtggccactggacatgaccttaccaaaacagggagatgggggaaactgggcttcaaggggacaagctaggccagtctttaaggagctcatggggctgtgtaggaggggtgctgacaagatctgacagcagctgttcccagtcaaggtagacactgctatgtgccacacagggcatgcagacagggcactgcaagggttgaagggagtagggagggtgaaatgtgctctcttggtctgtggcaggtgccgtgcaaacttcctgctgtgtgttcccttgtcctgtgtcacctacatccttgatgtctgcggtgaatggccagtgacagtgttaatggatttcctaacatgatcccctgaccaacgcggctgtagggcagacacacctctcaggcacagagcgaagcccccattgcagggtggtctggggcactctgtaggggcaagcgggatcctggtcgtttattgctttggctgttacaaggctctttctggaaggccacatctgttctcggatgttcacccagcagcccaaacagacaggtcagatcccagccctgcaatgtgacttattcaggaacctttaaagtggctttgaaagtcatttggtgccagatgtaccaaatgtcttggatgggctagagggctggggctgtgaggtgagaacttacctggcattgggactgccaggtacatccccaaagccacgcccctccagaaggcatctgttgagtttcatatgccccaggaggactctatatttaaggccaggcaggaggacaccctgagaaaccacgctgtcacgactcagtctctcagaatgccatggcagtttaaaaaaagtacacatacactttttgccacatcttagatgtccctccgcctacagaagccatcaaataaaaattaattttgcttcaaaaaaaaaacatgctgaatatttttgacactcaatgtctgttcatttgcatgggacacgttcttccataatgaatcatcgtaacgcttaaattaaacacagtaaaagaatggttaatgccataacacgctgacaatttaacctggccaatatttttattgccttgtacaagaaacctaacagagcaccacttgcttttgactggtggaaaatcggttatgaaccgccagggagcggccaatttttcaaatgcagtcattcagtcatacgatagccactatgactttttttttcccatacactattgctattataatcttttgagggtatttttatcacggcaataacctcctcaaaatcagtctttacagcagttaatgattggacagctggagctataactggccttggcattgcccccagctattagctaacaaaccagttgttatctgcaggtaacagccaatttcttgtggaatttttttgataaagtgcctcctggatcgaaggtattttttccctctttgtcccagcttcaagcatcttggggagcttggtgaagagatggaaagctggtggctctgtaacccccaggcatggagcgggatctctgagggttgctgtattgccacaggagagtggggactggcttttgtcgctgcctggctttgtgaagtgcagggtgagagtctggagaaagaggctgctctgctgaactggctggacagagaagggagctgactgccttggaggcgcagagaatggaccaggcagggccaggccttgagcgaccctgggagttggggtgaaagccaaacaatggggtcaattccattgttgagactcatttggtgccagatgtaccaaagatcttgggcaggctagatggctggggctgtgaggtgagaacttacctggcactgagacagccaggtgcatccccaaagccacgcccctccagaaggcatctgttgagtttcacatgccccaggaggactctatatttaaggctcggcaggaggacactctgagaaaccacaagagaaatctactgagtggacaggcaccttgcgtttgataaatctctgtgtttagatttcgatatcctggtttcatgtgtgtttcatttttgatcacccttctaaaatgtgagcttttaaattcgtgacttaaagttaggaaatgttcatctattttaaagtgaacacctttttttataaggaccagattagtaaatttggaccttggcactgatggctaagctacgttcaagcacaggatccttgttgggatgaaattctccaggttaacccaagtaaaattcagagcgggaatgttgagatagaatgctggaccaagagaagctaactggtaaagggacagcctgccttctgcgcccgcaaggccttctgcttttcatgctgcctggagagaggagccgcttcccttttcagccgtgactgtgttttaatatccctggtactaagtgtcagaagtggattgggtgctgcagcactagagcgaagagttaacatgacagcgatcacctgtttgtggcagcagtttgagattctgcagattgatcagtgtttactgtgtgagacccagagattcgattcctgaaatcacagggctgattgcagtaactttacatatgcgtccttaacaagcagggcaaaataaaaaaattaatattcttaaaagtgaaataagatatttccagcctggagagaagaccaattaaaatcacttcacatttttaaatgagttttcatttgagagagtggaattctttgaagaatatgagttttgctaaatatttgaaatcatcatatatcgtgcttatttgaagcccaggttgcttataaattcaatgacaaattgagaagtaagcacagaatttatgtttgaattatctgttgggtgactcccctgctggggcaggccccggtttcttaaatttggagggtcactctgggtaagctggaaggtaaactaggcttcctgcgaattcccaaattcaaatactgccatgggactaaagcaattccatgattttaaatcattttgaatttcataaacccaactctttaaccttttgtaaatgacaagaagtgcaacccattcttaacatttctgatcattccacacgatgctggccccataaagctcatcttttccaaatttaagcacttaaaaatgtgaagtgctccaataaatttaaattggcatatgctacgcatatcaatgggaaatgattcaagcattagaggctggaagtggtgagtgagggcaagcacgccagagcatccattgtcacaggattgatttttaatgactttctattgatttgatgccttttaaacctgaaggccgaaggttggtcctgcatatctatcacgctgtatctttggccgatgcactctcccgaggtgaatgtaggttgctttcaccctcttgccaagacagtgtcctatgaggatgcaggtccttcggggataggtcctggcttgcatagagccttccagggacaagaagtgaacagccacctggcagaagtgcagcccagtcttcaaggctctagtggttgtaagcaacaacatccatttcaagccaaaaagggatgcaccagctttcataactgcaaaggcctagggtgagtcagggatggctgggtgcagacactttctccttcccctttttttgtctctctctcacttcattttctctctagttctcttgcttccttttttgctgcacctctcctccatttctgcttctcagttgggaaaccttcaggcaaggctctgtgcgctttgtagcctcgggcagttccaggctcctattctcatgctcccaagtttatcagaaagaaatcctatctcaacaatgtaaaccaaaaatacaattctaaggcctcccaaccatctgaatggacccctcctctcagccaagggcactccaaagttaacctaaaaactagttcaaaccatgatgggaagggggagccagacatgcctcatgataccctcctccctttgggaattactgacagacagactctttaaagtctgataagaaacattcacaatctattctctctggagcctgatacctggagacatcatctgcatgataaaacctcaggctctacaccttatcataacccacacatttctttctattgataataactttttcaacgaattgccaatcagaaaatctttgaatccacgtatgacttggaagctctctgcttccagttatctctacattctggacccaaccaatgtacattttacatacattgactgatgctttatgtctccttaaaatgcataaaaccaagttgtggcttgaccaccttgggtgcatgttctcaggatctcctgagggatgtgtcacaggccattggtcactcatatttggctcacaatacatctcttcaaatattttacaaagtttgactgtttgttgacaacaatatcaaaagagggtgtgaatcgtgggtcactggaccatcttgggtcatgtgcccagttctaagccagttgccatggtcagggggatccaatgttctgattggccccattctcactcctagagctaggagtggaataaaatcccaaacactggaacttggagtgagagagagataagtatgagtcctatatggggcatggaggtcccttctgactccagatgtttctgattctctgttgtgagtaaaattgcttctgcttgtttccttgcaattgttacaggaaaggggtcctgatctagaccccaggagagcattcttggatttcactcaagaaataattcaggacaaatctgtagagtaaagtgaaagcaagtttattaagaaagcaaaggaataaagaatggctactccatagacagagcagccctgagggtagctggttgcccactgttatggttatttcttgatgatatgctgaacaagggtggattattcatgcctcccctttttagaccatagagggtaacttcctgagctggtgggactgtagcagtgaggacaaccagaggccatcttggatttgaggggatttggcctgcttctttactgcaacctgttttatcagcaaagcctttatgacctgtatcttgtgctgagctcctatctcatcccgtgacatagaatgccataattatctgggaatgcagcccagtaggtttcagcctcattttatccagcccctattcaagatggagttactctggttcacaacctctgatacaattagctgtgctgtgtgatttgccatggccagtgaccagggaaaccaagtgtgtcacttcttggtggaaaccttaagaattccaggcagtggatgttcttgcagcctgggacctgagtagagaggcccaggagtggagcccttggctagccaacccatgattaacatgaacaatggaagcaaacattggttattagaaaccacagatatttgaggattgttcatagacacaacataacctagcctattctgtgtgatgtggacatcagtatcagaaatgaggtcttaccaaaacccaaacctaaaatgtatggcattgactttgtgttgggttagtgaacagtgaagaaatttaccagaggctggaaagatggcaaactatgtgatgatgtagtaaaacatttggcaaaactgtcatgtgcagtaattcaggagacaaaatggaaacttgcagttcttggggagagtttcggggatggaatgttcatggcgtgtggtggtggttgttggctgcctttggcaaagtatcagaagaaaaagatgaatttaaaaataattttctgatttgtaagcaggaataaaagagaatactcagggagtactacggttggaagctgcaactccttctcatctcctaacagcaaaagctagaattgagaaacactttcaatgacaaagtccttaaagaaatatgaaatcatgaacattgctttcatacccattgttaaagtctctgaatggatgaaagtgtttcaggcaaatactcattacaggatgtggagccccttgaatactttcagttggacaaaatcctgagggaaaaggaggttaagatgagatcctcttcccaaagcttgataggttcaaggcatatattataaagcttaaggagagatgtggagaattggaaaaaatatccctcccccctgcatattaggaaaagaaatggacaatgcacaagtgcacaccctctgttgaacctatcagaaagctgaggcctcaggacaacactaaccccaaatctggagagtgacaggggtctttgggggaagcagggggcgtggcacttgcttagctgagggcagaagtcatcagacactggtaggaaggattcagctagagtagtggatgcatgagtgaaggctgagaacaggctggtgaaacgatgtgaagcccatggagctgcagaaatgaaggcaggtgggtagcctcttgcaagcttcttctcaaaccccaccaggcactcacagggaagacagggaaggatcttgagaaagtttcctttgtgcaggccttgggaagggaaaaaataaccaccacaggagaggcagaaaactctactcagactattctcttctatctctcctagggagcaaaagccttaatttgcaggacaaaggccatcaaagactgttgttgcacttagcgcattaagaaagcccattgcagctgggataagagagcagaaaaaaatacgctagccctggggaagtggtaggaaaaagtactggattcagaacctataactacagcccataaaaccaacaattgctctagttacaactagagggatttgaagcctctggtgcctagagggtaaatatagtaacaacaaacctcagaggcagtctaactcctaacaagattagtataaaactccacattaaagacccagaaaaaaaaaagttatgcccatttctgagcttataaggctttaatggaaaagatgcacagcatacaaaatcagatgggtaatttcagaagaaagatggaaactataagaagaatcaaatggaaagggttgaaataaaaacagaaacaaatattgataattgaattagagctccccagagcgacaaaaccactaggagattatagacgtagatatagatatagatatatgagggagatttattacagtgtgttatcattcttgcattgctataaagaaatacctgagactgtgtaattgatgaagaaaagaggtttaattggctcatggttctgcaggatttacaggaagcatggtgctggcatcagctcagcttctgaggaagcctcaggaagcttacaatcatggcagaaggtgaagggagagcaggcatgtcacatggccagagcaggagcaagagagagtaggggatggaagcgccacacacttttaaataaccagatctcatgtgaactcagagcaagagctcacttgtcaccaaaaggatggctgaagccattcatgtgagatccaccccaatgatcccaaatacctctcaccatgccccacctccaacattgggaattacaattcaacatgagatgtgggtggggacaaatatcaaaactatgttataagggaattggctcacacaattatggaggctgagaagttccatgacaggctgtctgtgagttgtagagcctaggatgccagtagcatggcttcagaaccaggatagctgatggtgtaactctcagcctgaggtaaacggcacgagagcaacgagcctggaattgtccaaagacaggagaggaagagtatatgtcagctccagcagacagatcaacatatttgcctcttccctatttttgttctctccaggcccccagcaaattggatgatgcgcacctacattgagggtggctctaccccacctagctcactcagactcaaatgctaatttccttgggaaacgccttcacagacatacccaaaaataatgctttactaggtttctaggtattttttatacttcagactaagaaacctaatcaagttgacacctaaaattaactatcaaaatgcctttgacaggctcatcaataaaattaacagctgagtgagcagcaggcttgacagctaagtgaatttgaagataggtcaaaagaaattgcctaactgaagcacaaagaaaataaaatttacataacaaatacacaaaaaagacaatagtgcatccaagagttgtggggcaatatcaaataatatatcacatgcattattggaattctagaaggaaaagagaaaaaatagggcagaaaaatgatttgaagaaataatggccaagaattttctaaaattaatgacagacacaaaactccagatccaaaatgcttagacaataccaaggaggataaatagacctaccctcaaaaaacaaaattaaaaaacatgtaggcatgtcaaattccatctgttaaaaacagaaaacaaataaatcctgaaggcagccagagagggaaaaaaagaccatattcaatacgaaataacaaaggcacttgttttcagaatccatgcaaggcagaagacaatggagtgatatctttaaagtactgaaagaaaaaagaattgcctaccttaaatgctatacccaatgaaaacaggtttcaaaatgtaggaggcataagaagttctccatgaaaaaaaaattaaagaatttatcacttgaagatgtgctctataagaaaagtaaaaggaagttcttcaggcaaaatgaagacagtctcagacaaaaacttggaagagtaacgtaaataaaataaatgaaagtaaaataacttttattttattttttaattactctaaaagacaactgcctgaagcaaaaaataagtagtaattatttgtatatttatacctatgtaaaatatatggtaataacacatagaatgggagggaataattggaggtgtactgttggaaggtctttacactacatgtaaaacatgtataatattacatgtaaaatactacctgtaaaatatactacatgtataatattacatgtaaaatactacaagtaaaacagtataatattacttggagacaggctctgattaattaaaaatatattttataaaccttatgacaactactaatgaaataataagaggcataaataatcagtccatggtggagataaaatggaatcaaaacaatatttaagtaattcaaatgatgggagacaaaagaaataaaaacagaagaaattaattgaaaaaagctgctaagatagattttaatcaaaatacaatttggatcaataaccacactaaataggtatgtctaaatacattaatcaaaaggcagagacttccaggttggataaaaaagcagtatgctatctacaatatactatgtacaagaaactcacaatatgctatctataatatacctgtacaagaaactatacagagctacattaaaagtaaaaggataaaaaaagatataccatgtgcacactggtttcatttctcttgagtatatatctaggagtagaatttctgggtcatattgtaactctatctataactgttgggagaactgccagactgtttttccaaagtggttgtaccattgtacattcccatcagcagtgtttgagggttctgatttatccacatcctcatcaacacttgtttatatttgactttgattacaaccattttattagtccattctcatagtacagaataggaaagcaataggaaaaaaatcaatgaaaccaaaatctagtgcttcaaaaagataaacaaaattgataaacctttaactatattgataaaaagaagattaaaattattagaatcagaaatgaaaaagggaacattactactgactttacagaaatcaaaagatttataaaaaactcctatgaacaattgtataccaataaattagataacttacataaaatgaacaatttctagaaagacacaaagtgattgtggtctacaaagaccaaaatggactcaagaataaataggcaatctgaacaaatagagatggaatgaataattaaaatattatataaaaagaaaatcccaggccagatagcttcactgctgaattctaccaaatctttaaatagaagaattaatactttttgtttactttggagagatcatcacaaacttcaaaaaaatagaagagaaggggacactgccaaactcattctgtgaggccagtattaccctgatacaaaaaccagacaaagacaccacaagaaaagcactgatcccttatgaatacaaatgcaaaagtcctcaacaaaatattagcaaatcaaatccagcaacatgtaaaaagactttaccatgagcaagtaagattcatcccaggaatgcaaggttggtttaatatcccaaaatcaattaatgtaatgtaccatattaatagaataaaaagggaaaaccacattattttcttaatagataccaaaaaaaatttctaccaaatccaacaccttacattaaaaaatactcaacaaactttaaatggaaggagcttcctcaacctcaaacccatagctatcatactcaatggtgaaacactgatactttttgtctaaaataaggagtgcaaaacaaggatatccactcacaccacttctattcaacctggcattagaagttctacacaagacaattagtcaatgaaaccaaataaaaggcatccagatggaaaagaaaaaagtaaaactacctgtagtcatagaagacatgatcttgtgcatagaaaattctaaggaatccactaaaaactactagaactaacaagtctagcaagagtgtagggtacaagatcaatatacagaaattaattgcattcctatactctagtgatgaagaattagaaagagaaattaagtaaacaattccatttacagtagcatcaaaaggaataaagttagaatagacaataaaataaatgaaaaacttttactctgaaaactacaaagtattgttgaaaggaattttaaaagatctaaataaatggaaaacatcccatttcggtggattgcaagaccaaatattaagatgacagtactcccccaaataaatctcattgttgaatagagtgttctatagatgtgtattattctataggccaagtgataaattatgtaaataatgttttacacagttgctttttaaacctcttaagagaagaaaagagaagagtatacatttatactgcattctgtaattatatgatcacttttactagtattgttttttcttgtggatgcttttaacctgaacaacttcccgccttaggacttgttgtaaggtaggcctgttagcagcaaattctctctgcttttgtttatctgggaatacatttatgtcacctttagttttggaagatagctttgctggatacagaattcttggttgacaggtttctttttttttttcttcatgcagttttagcactgtgttctggccttttttgtttctgttaaaaagtcagctcttaaacttactggggtttccttgtaagtgatgagtcatttttctcttggtgctttcaatatttcctccttctctttcacttttagcagtttttttttacgtgatgtgtctggatttctttgtgttaattccacctacttggagttcattaaattttctagatgggtagattaattttcaatgaatttgggacatcttcaaccattatttccttgaatattgttttctgcttctttgtctctcctctatgtccagtactccaattacatgtatgttggtgtgcataatggtctctcaccaacttctcagaagctctgttcatctttaaaattcttttttctctatgttcttcagattgtataatctccattgatctgtcttcaagttcgttaattattttttctgccagttcaaatctattgtggagctcctctagtgtatttttcattgcagttattgtgctttttaatttcagaattttcacttggttattttcaaataatttctatttctttatgaatagcccatatttaatatgacattataatatatttctctttacttctttagtcatggtttctttcagttctttgaacatatttataatggctattttgaagttttttttttattatactttaagttctagggtacatgtgcataatgtgcagctttgttagatatgtatacatgcgccatgttggtgtgctgcacccattaactcgccatttacattaggtttatctcctaatgctatcccttccccctccccccaccccatgacaggccctggtgtgtgatgttccccaccctgtgtccaaatgttctcattgttcagttcccacctatgagtgagaacatgtggtgtttggttttctgtccttgcgatagtttgctcagaatgatggtttccagcttcatccatgtccctacaaaggacctgaactcatccttctttatggctgcatagtattccatggtgtatatgtgccacattttcttaatccagtctatcattgatggaaatttgggttggttccaagtctttgctattatgaatagtgccgcagtaaacatacgtgttcatgtgtctttatagcagcatgatttatagtcctttgggtatatgtccagtaatgggatggctgggtcaaatggtatttctagttctagatccttgaggaatcgccacactgtcttccacaatagttgaactagtttacggtccctccaacagtgtaaaagcatttctatttctccacatcctctccagcacctgttgtttcctgacttttgaatgatcgccattctaactggtgtgagatggtatctcattgtggttttgatttgcatttctctgatggccagtgatgatgaatattttttcatgtgtcttttggctgcataaatgtcttcttttgagaaatgtctgttcgtatccttcacccactttctgatggggttgtttgttttcttgtaaattcgtttgagttcattgtagattctggatattagccctttgtcagatgagtagattgcaaaaattttctcccattctgtagtgtgcctgttgactctgatggtagtttcttttgctgtgcagaagttctttagtttaattagatcccatttgtcaattttggcttttgttgccattgcttttggtgttttagtcatgaagtccttgcccatgcctgtggcctgattggtattgcctaggttttcttctagggtttttatggttttaggtctaacatttacttttttaatccatcttgaattaatttttgtataaggtgtaaggaagggatccagtttcagctttctacatatggctagccagttttcccagaaccatttattaaatagggaatcctttccccattgcttgtttttatcagatttgtcaaagatcagatggttgtagatgtgtggtataatttttgagggctctattctgttccattggtctatatctctgttttggtaccagtaccatgctgttttggttactgtagccttgtagtatagtttgaagtcacgtagtgtgatgcctccagctttgttctttttgcttaggatagtcttggcaatgcaggctcttttttggtcccatatgaactttaaagtagtttttttccaattctgtgaagaaagtcattggtagctggatggggatggcattgaatctataagttaccttgggcaatatggccattttcacaatattgattcttcctatccatgagcatggaatgttcttccatttgtttgtgtcctcttttatttcgttgagctgtggtttgtagttctccttgaagaggtccttcacatcccttgtaagttggattcctaggtattttattctctttgaagcaattgcgaatgggagttcactcgtgatttggctctctgtttgtctgttattggtgtataagaatgcttgtgatttttgcacatgggttttgtatcctgagactttgctgaagttgcttatcagcttaaggagatttggggctaagatgatggggttttctaaatatacaatcatgtcatctgcaaacagggacaatttgacttcctctttttctaattgaatattcttcatttctttctcctgcctgattgccctggccagaacttccaacactacattgaataggagtggtgggagagggcatccctgtcttgtgccagttttcaaagggaatgctcccagtttttgcccattcagtatgatattggctgtgggtttgccataaatatctcttattattttgagatatgtcacatcaatacctagtttattgagagtttttagcatgaatggctgttgaattttgttgaaggccttttctgcatctattgagatagtcatgtggtttttgtcattggttctgtttatatgatggattacatttattgatttgcatatgttgaaccagtctttcatcccagggatgaagctaacttgatcatggtggataagctttttgatgtgctgctggattcagtttgccagtattttattgaggatttttgcattgatgttcatcagggatattggtctaaaattctcttttttttgttgtgtctctgccaggctttggtatcaggatgatgttggcctcataaaatgaattagggaggattccctctttttctattgattggaatgctttcagaaggaatggtaccagctcctctttgtacctgtggtagaattcagctgtgaatctgtctggtcctggactttttttggttggtaggctattaattattgcctcaatttcagaacctgttatcagcctattcagggattcaacttcttcctagtttagtcttagaagggtgtatatgtccaggaatttatgcatttcttccagattttctagtttatttgcgtagaggtgtttatagtattctctgatggtagtttgtatttctgtgggattggtggtgatattccctttatcattctttattgcatctatttgattcttctttcttttattctttattagtcttgctagcagactatcaacgtgatgatcttttcaaaaaaccagctcctggattcactgattttttgaagggtttttgtgtctctgtctccttcagttctgctctgatcttagttatttcttgtcttctgctagcttttgaatgtgtttactcttgcttctctagttcttttaattgtgatgttagggtgtcagttttagatcattcctgctttctcttgtgggcatttagtgctataaatttccctctacacactgctttaaatgtgtcccagagattctggtatgttgtgtctttgttctcattggtttcaaagaacatctttatttctgccttcatttctttatgtacccagtagtcgttcaggagcaggttgttcagttccatgtagttaagcggttttgggtgagtttcttaatcctgaattctagtttgattgcactgtggtctgagggacagtttgttataatttcttgtcttttacatttgctgaggagtgctttacttccaactatgtggtcaattttggaataagtgtgatgtagtgctgagaagaatgtacattctgttgatttggggtggagagttctgtagatgtctattcggtccacttggtgtagagctgagttcaattcctggatatccttgttaactttctgtcttattgatctgtctaatgttgacagtggggtgttaaagtctcccattattattgtgtgggagtctaagtctctttgtaggtctctaaggacttgctttatgaatctggatgctcctttattgggtgcatatatatttaggatagttagctcttcttgctgaattggtccatttaccattatgtaatggccttctttgtctcttttgatctttgctggtttaaagtctgttttatcagagactaggattgcaacccctgcttttttttgttttccatttacttggtagatcttcctccatccctttattttgagcctgtgtgtgtctctgcacatgagatgggtctcctgaatacagcacactgatgggtcttgactctttatccaattttccagtctgtgtcttttaattggagcatttagcccatttacatttaaggttaatattgttatgtgtgaatttgatcctgtcattatgatgttagctggttattttgctcgttagttgatgcagtttcttcctagcatcgatggtctttacaatttggcatgtttttgcagtaactggtaccagttattcctttccatgtttagtgcttccttcaggagctcttgtaaggcaggcctggtggtgacaaaatctctcagcatttgtttgtctgtaaaggattttatttctccttcacttatgaagcttaatttggctggatgtgaaattctgggttgaaaattattttctttaagaatgttgaatattggcccccactctcttctggcttgtagagtttctgccaagagatccacttttagcctggtgggcttccctttgtgggtgacctgacctttctctctggctgcccttaacattttttccttcatttcaactttggtgaatctgacaattatgtgtcttggagttgctcttctcgaggagtatctttgtggtgttctctgtatttcctgaacttgaatgttggcctgccttgctaggttgtggaagttctcctggataatatcctgaagagtgttttccaacttggttccattctccctgtcactttcaggtacaccaatcagacgtagatttggtcttttcacatagtcctgtatttcttagaggctttgttcatttctctttactcttttttctctaaccttctcttctcacttcatttcattcatttgatcttcaatctctgataccctttcttccacttgatcaaattggctactgaagcttgtgcttgtgtcacgtagttcttgtaccatggttttcagctccatcaggtcctttaaggacttctctacactgtttattctagtcagccattcatctaatcttttctcaaggtttttagcttctttgcaatgggtttgaacatccttctttagctcagagaagtttgttattaccaatcatctgaagccttctactctcaacttgttaaagtcattctccatccagctttgttccattgctggcgaggagctgtgatcccttgaaggagacgaggtgctctgatttttagaattttcagcttttctgctcttgtttctccacatctttgtggttttatctacctttggtctttgatgatggtgacgtacagatggggttttggtgtggatgtccttcctgtttgttagttttccttctaacagtcaggaccctcagctgcaggtctgttggagtttgctggagatccactccagacctgtttgcctggttatcaccagcggaggctgcagaacagcaaatattgcagaacggcagatgttgctgcctgatccttcctctggaagcttcgtttctgaggggcacccagctgtatgaggtgtcagttagtccatactgggaagtatctcccagttaggctactcaggggtcagggacccacttgaggaggcagtctgtccattcttagatctcaaactctgtgctgggagaaccactactctcttcaaagctgtcagaaagggatgtttaagtctgcagaagtttctgctgccttctgttcagctatgccctgcccccagagatgaagtctacagaggcaggcaggcctccttgagctgtggtgggttccacccagttcgagcttcctggacactttgtttacctactcaagcctcagcaatagtggacgtccctcccctagcctcgctgctgccttgcagtttgatctcagactgctgtgctagcagtgagtgaggctcccaggaatgggatataatctcctggtgtgctgtttgctaaggccattggaaaagtgcagtattagggtgggagtgcccaattttccagatactgtctgtcatggcttccctttgctaggaaagggaattacctgactccttgcacttcccaggtgaggcaatgccctgccctgctccgtgggctgcacccactgtctgacgagccccagtgagatgaacccagtacctcagttggaaatgcagaaatcacccatcttctgtgtcactcatgctgggagctgcagactggagctcttcctgttcagccaccttggaaccaaagccttgaagtctttttgtgataaatttgacatctggtcatttgtttttattatactttaagttttagggtacatgtgcacaacgtgcaggttagttacatatgtatacatgtgccatgtttgtgtgctgcacccattagctcatcatttaacattaggtatatttcctaatgctatccctcccccctccccccaccccacaacaggccccagtgtgtgatgttccccttcctgtgtccatgtgttcccattgttcaattcccacctatgagtgagaacatgtggtgtttggttttctgtccttgccatagtttgctcagaatgatggtttccagcttcatccatgtccctacaaaggacctgaactcatcattttttatggctgcatagtattccatggtgtatatgagccacattttcttaattcagtctatcattgttggacatttgggttggttccaagtctttgctattgtgaatagtgcctcaataaacatacatgtgcatgtgtctttatagcagtgtgttttataatcctttgggtatatacccagtaatgggatggctgggtcaaatggtatttctagttctagatctctgaggaattgccacactgacttccacaatggttgaactagtttatggtcccaccaacagtgtaaaagcattcctatttctccacatcctctccagcacctgttgtttcctgacttttgaatgatcaccattctaactggtgtgagatggtatctcattgtggttttgatttgcatttctcttatggtcagttatgatgagcattttttcatgtgtcttttggctgcataaatgtcttcttttgagaagtgtctgtttgtatcctttgcccactttttgatggggttgttggtttttttcttgtaaattcgtttgagttcattgtagattctggatattagccctttgtcagatgagtagattgcaaaaattttctcccattctgtagtttgcctgttcattctgatggtagtttcttttgctgtgcagaagttctttagtttaattagatcccatttgtcaattttggcttttgttgccattgcttttggtgttttagacatgaagtccttgcccatgcctatgtcctgaatggtattgtctaggttttcttctagggtttttatgcttttaggtctaacatgtaagtctttaatccatcttgaattaatttttgtataaggcgtaaggaagggatccagtttcagctttctacatatggctagccagttttcccagcaccatttattagatagggaatcctttccccatttcttgtttttgtcaggttcgtcaaagatcagatagttgtagatatgtggcattatttctgagggctctgttctgttccattggtctatatctctgttttggtaccagtaccatgctgttttggttactgtagccttgtagtatagtttgaagtcaggtagcgtgatgcctccagctttgttcttttggcttaggattgacttggcaatgcaggctcttttttggtcccatatgaactttaaggtagttctttccaattctgtgaagaaagtcattggtagcttgatggggatggcattgaatctataaattaccttgggcagcatggccattttcatgatattgattcttcctacccatgagcataaaatgttcttccatttgtttgtatcctcttttatttcattgagcagtggtttgtagttctccttgaagaggtccttcacatcccttgtaagttggattcttaggtattttattctctttgaagcaattgcgaatgggagttcactcatgatctggctctctgtttgtctgttattggtgtataagaatgcttgtgatttttgcacattgattttgtatcctgagactttgctgaaattgcctatcagcttaaggagattttgggctgagatgatggggttttctagatatacagtcatgtcatctgcaaacagagacaatttgacttcctcttttcctaattgaatatcctttatttctttctcctgcctgattgccctggccagaacttccaacactatgttgaataggagtggtgagagacggcattccagtcttgtgccagttttcaaagggaatgcttccactttttgcccattcagtatgatattggttgtgggtttgtcatagatagctcttattattttgagatactttccatctgaagaaaatagagacacaaaaaacccttcaaaaaatcaatgaatccaggaggtggtttttggaaaagatcaacaaaattgatagaccactagcaagactaataaagaagaaaagagagaagaatcaaatagatacaataaaaaatgataaagcggatatcaccaccgatcccacagaagtacatactaccatcagagaatactataaacacctctacgcaaataaactagaaaatctagaagaaatggataaattcctggacacatacaccctcccaagactaaaccaggaagaagctgaatctctgaatagatcaataacaagctctgaaattgatgcaataattaatagcttaccaaccaaaaaaagtccaggaccagatggattcacagccgaattctaccagaggtacaaggaggagctgttaccatcctttctgaaactattccaatcaatagaaaaagagggaatcttccctaactcattttatgaggccagcatcatcctgataccaaagcctggcagaaacacaacaaaaaaagagaattttagaccaatatctctgatgaacatcgatgcaaaaatcctcaataaaatactggcaaaccgaacccagcagcacatcaaaaagcttatccaccatgatcaagttggcttcatccttgtgatgcaaggctggttcaacatatgcaaatcaataaacataatccatcatataaacagaaccaatgacaaaaaccatgattatctcactagatgcagaaaaggcctttgacaaaattcaacaacccttcatgctaaagacatctggtcattctcacaagcagtttctgttactcgttttttgttctggtgtatgtgttatacttttatgtttgctttgcaagttttaattttttgtaaactggacattttaagtaatatattgtagcaactctgcagattgatctttccccctttggggattttaaattattttcttgtttatttttttgatgactggctggattgttttaatgaagtctattgtctcccacctcccccagtatgaagcttctgatgtcactccttgggggctagggggaagccttggatatgactatagtcaccctgggttgatagtggctttggaaggactcactttgactgtgtcttccccagccaccccagcagacaatcaccactaatttccagctcattacttcttcattgtttttttaaaatttctttgaacataggtgggagtaaactgatccaataaatttggagtccctttgaagggatagttattgaggtcaatgtgtgagatttgttctgaccctaggaggtcctctcacttgtctttctccctgactctttctagcaaactaactggcctgtagtttagcatatatctccagtgattctgccaatctcctttcaattgccttttaccacaacttgcattgtttttgagcggtgtccttaggcttgaagtccataccatgttacaaatgatgtgtttctttgaaaaaagattcagagctcttttttatgtcttgctgcttcccctaggcaaaaatctgtcatccatggctctgaagctgagagttgaaacaatggtacacttctctctgcaggagagaagtttggtttgcctctcctggcttggatttgtgaactacaaatgagccagggtgagggtaatctaaaccgcagtattcccagcacatcacacttgcggtagagcttccaacccatgagtggggagtgggaagaggcagggacaacatccaacttctcagctgcactcacctggaagggagccttacaacagctagctgaaggcaaaatgagagatgctgatgtcctgtccatcccaagaagacagttttctgactgggggctggggaagatgcacacatctacagtggagtttccattttgctgagctgagaggaagaagggtgagagcagttggttcaaattccagagactcttgctgttgttactgaattttagtagattttcttgagtaactgatttttcatctgttgtatgctcttaatatcatttccagaagtgttaaatgattggatagtttttacgattttcatcagtttcaaaggggaatgagaatacagtttcttatgctatcatgacaaagtgtaactcaaagaaggatactttcttaaaagagcagctacaaaatttctacagttgacatcatacttaatggtgaaaaactgaatgctttctctctaacatgaggcataaggaggatgtaatctctcacagttcttattcaatctcataatggaagccagtgcaataaggcaagaaaaataaataaaaggcatatagactgaaaaggaagaaacagaacacctgtatttgtatacaatacaattacgtatatagaaaatcccagataatttacaaaaaaagcttctagcacaaataattgaatttagcaaggctgtagaatacaagctcaatatataaaaaccaaatatatttctttataccagcaatgtagaattgaaattcaaaatttaaaacagattaatcacagtacaaaacataaaatacttaggtgtaaatctaacaaaatatgtataggatctgtatgctgaaaaatataaaacactggggaagaaataaaagaagacctaaataagtggagagatatccattatcacaaattagaagattcagtattgttaagatgttaatcctccataaattgatctagagattaactccaaccctatttaaaatcccagcttttaaaaatagatattaacaagttgttcctaaaatttatatggaaaggcaaggaaactagaagagccaaaacaattgtgaaaaggacaaatctggaggactcacactacctgatttcaagacttactatagagctacagtaatcaagacaactatggataaaataatagtcaatggaacaatggaattgaatagagtccagaaatagacctacaaaatgtctttgacaaagatacaaaagaaattcaatggagaaggaataatcttttcaagaaattgtgtttgattggactttcctatgcaaagaagtgaaccttgatccaaacattacatttcatagaaaacaaacaaacaaacaaaaaacaaacaaacctgaaaatgaattacagatataaatgtaaaatgtgaaactataaaacttctataagaaaacatgggacaatatcttcaagactgtgaattaggcgaagttttagatatgacactaaaatcaggatccgtaaaaaaaaaaatcggactttattaacattaaaaactgttgctctggaatagtcacgttaagagaataaaaacaagacaaacattgggataaaatatctgcaaatcacatttatgacaaagaatttatgtcctatatacataagtaacttttaaagttcaacaagacactaaataacccagtttttacaatgagaaaaagatctaaatagataccttgccaaagaagatatacagatagcaaataggcagatgaaaagattcccaatgtccattagtcattaggaaagtacaaattaaaattataacaagatatcactataatcctattagaatggctaaaattaaaaaaatctgacaatactaagtgttgacaaggatgtagagtgactttaactctaatgtactgttcttgggactggtaaatattacaatcattgtggaagacagtttggaagtttcttatacagtttactataaccagcaatcccactcttactaaataaaatcttatgttcacatgaaaacctgtatgcaaattttaatagcaactttattcataacagccccaaactgaaaacaacacagatgtccttcaaccaaggaagaaataaacaaactggggtgcttccttgcaatggcataccactcagtaatgtaaaggagcaaactatctgtattagtcagggctctctagagggacagaactaataggatagataggtaaagggaagtttattaaggagtattgactcacacaatcacaaagtgaggtcccacaataggctgactgcaagctgaggcactaggaagccagtccgagtaccaaagctgaagaaattggagtctgatgtttgaaggcaggaagcatgcagcatgggagaaagatgtaggctgggagactcagccagtctagtcttttcatgttcttctgcctgcttttattctagctgtgctggcagctgattatgttgtgcccacccagattaagggtggatctgcctttcccagtccactgactcaaatgttaatctcctttggcaacactctcacagacacacccagggccaatacttacagccttcaatccaatcaagttaacactcaatattaactactgatacactactgatacacacagaaacatagatgactattacatacattgtgctaagtgaaagaagacagaatcaaaagatttcatatttgatgacaccatttatatgacattttgaaaagggcagaacaatagggatggagtcaggagtaggagttggaggaaaagatggattacaaagggtctgcatgaggaaattttggggtagtgggatgtatcatgactgtggtggtgaatacccgatgagttattttgtcaaaactcgtagagctcatcatggagtttaagttaaaaagcaaaaacaggatgtgggggagacaaaaaatgaaatgcaaactgcggtaaatgaacctaactgtactacagatgaatgacataagcacactaaaaaagtgggaaagaaaaaaaactgaacctaagttaccttgtaaaatattcaatgtttcactagataatgtaaagataaagagaaaaagaattgcacatgaatgcggtattctggttagtaaatttgtttctcatgggagtgcaagtttgcaattccgtaactacattatgtgtatagaaaagttgaacagataagtaagtgtattttagataatacaggccagatttctcactgttggaaaaagaaattataattaaggaaaggagaaggctagaatgaaccctgcattgatgaattggaatgagaggtatcagtatgaatttacttaaaaacaacaaacacatgggtggatggatggatggatgggtagatggatagatagacagacagatacagacataaatacaagtatgtgtatatgcatggagaagaatacattatatatttataagttctgtttgctgaggtggcctagaagcaatgacaccctagtgacaatgggtacacctaatgctctaaatttggtttctaagtatcattcttcaataaaaggaaccagagtgtcttttagaagtgtttgattctagtatggggtagggataatacaagatgaacctggagcatcttgtagtgccagaaagtcagaaattgcttaaaaaagaagagagcattttgaaaaggcccaagagccaacctcaaagaggccccaatggccaatactcaaacaacttgagcaacaaaataaatagtgacactattcagatataacccaataaaatacatatctatgtgtccatactggtataagtaaacaattgaatatacaaataaatagagagaaggtataactgttccttacagaagaatcctggttactgtaagtaaaagaaaagaaggaaatagaaatcatattaaacacagtaataattgttgcagataagatgcactgatgcatgttaaaattaggttagaagtttgagtagatacagaatatttgcacagtttcaaagtaactcccccaagatatgtattaataacaaaaggaaaaatcatgactttcaagtagagaaacttggaggacatcattcaaagtaaaaaagatggccaggtgcagtggctcacacctgtaaccgcagcactttgggaggccgaggcagatggatcacctgaggtcaggagtttgagtccagtctggctaaaatggtgaaaccccatctctactaaaaatacagaaattagttgggtgtggtggcaggcgcctataatcccagctacttgagaggctgagacaggtgaatttcttgaacccaggaggcacaggttgcagtgagctgagattgtgccattgcactccagtctgggcgacaagagtaaaactctgtctaaaaaaaacaaacaaaacaaaacaaacaaataaacaaacaaaaaaccaccaaagtaataaagattaacattgctgggtgtggtggctcatatctataaaacgagcactttggcaggccaaggtgggaggattacttgagcccagtagtttgagacctgcctgggctacagagtgagactctgactctacaactaaacaacaacaacaacaaaaatatctgggcgtggtggcatgcacctggaaccccagctacttgggaggctaaggcgggaggattgcttgagcttaggagtttgaggctgtagtgagctgtgattacactggagcctgggaaacagaacaagatcctgtctcaaagaataaaacaaaacaaaagattaacatcactgagagaaagacatatcaatatcatgaaaaccctaatccaatgtgctgagaaggacacatcatttctttaggtggcaacgaggctgtagtctccactgccaaaaactcactgagtggttgtggactaactgccactctctgggcctcagtctcctcatatgcattgaagaattggggtagataaaggagaggttttcaaataagttcgtttgatcctctgtttttgccaaggagtcttttcctctcaaataaaaacacaggacggagtggttctgaatctacataaaaatgtgtagcctggctggatgaggtggctcacatctgtaatctcagcactttgggaggctgaggcagggggactgcttaaggccagaagtttgagaccagcctgggcaacatagtgagactctgtctctgttaaaaaaaaacaacaacaaaaacacaaaaattggctgggcacagtgactcagacctgtaatcccagaactgtgggaggctgaggcaggcagatcaactgagcatagcagttcgagatcaccctgggcaacatggtgaaacccaatctctattaaaatacaaaaaaattagccagtcgtggtggcgagcacctgtagtcccagctacttgagaggccgaggcatgagaattgcttgagcctgggaggcggaggttgcagtgatctgatatcatgtcactgcactccagtttgggctacagggtgagactccatgtcaaaaaaaattttttttttaattagctgagcatggtggcatgcacctgtagtcccagctacttgggaggctgtggtgggaggatcccttgagcccaggaggtcaaagttacagtgagctatgattgtgccactggactccagccaggacagcagagagattttgtctcaaaataaataaataaaaaagcataacctaaagataacaagaaggaatatcaaacaaacccaactgaggcacagtttaaaatatacttgatcagtactttctaaaatgtcagggtcatgaaggacctcggaaagactgaggaactgtcacccattgagggagacaaaggaggcgtgatgacctaatgatcttggttggcccagctcagataattgtaattggtcatacaagatactaagctcaggggaatttttgcatctcttctgtaaggctatgattatttcaaaataaaaaattaaaaatacaacaaaaagtaatgagagagggagagatagaggtgtgagtacaaagagaaccaaaaagaaaagtggttttgggggctctatctcaaaaagaactgtgggcctcgttgtcggcaagtggagttgatgagaggcaagtagataagatgctgatctgtgtaatcccaacactttgggaggccgagacgggcagatcacgaggtcaggagattgagaccatcctggctaacacggtgaaacctcgtctccactaaaaatacaaaaaattagccggggtggtggcgggtgcctgtagtcccagctaccccggaggttgaggcaggagaatggcgtgaacctgggaggccgagcttgcagtgagccgagattgcaccactgcactccagcctgggcgacagagcaagacactgtctcaaaaaaaaaaaaagaagctgatctgttctgagtgaattatagtgccaaaagtattgtcagcctgtgctgttaagagagactgactgagtcttaaagtcacccttgggctcccagtgctgtatgggtaggaagcagctggacaacactggccagtcctccgggaggccatagtcccagtgcatgcctcagataagccagagaagaatcttccagatgacagagccagggtcagggagctactgccttggagcagaatcagagcccaatcagaggaaaaggttgtagggtactgagccgctaaaatgctttgctggcaggattttgggatagctgtgcacagttgttgcaggtaagatgcatttctgggctgggtgcagtggctcatgcctgtaatcccagcactttgggaggccgaggcgggcggatcacgaggtcaagagatcgagaccagcctggccaacatggtgaaaccccgtctctactaaaaatacaaaaattagctgggcgtggttgtctgcacctgtaatcccagttactcaggaggctgaggcaggagaatggcttgagcccgggaggcggaggttgcagtgagctgagatcagacctctgcactctagcccaggcaacagagcaaaactccgtctaaaaaaaaaaaaaaaggaaaaagatgtacttctgtgacttctctttgccctgcctctgaatgggagtgcttactgaaggtgtctagtctctgttccaccattctagagcaggtgcacattggggtgggcagtccaatcccttggcttatagcttcaagtctctggagcaagaggaactccattaaactggggcggaagtgtctgatatgtgtgagaagcaaaacatttaatgacgataagtgcagtctttgctagtgcttagcactgcacgtttctacatctgcttgtcctccttccagacacacagtacgattgcacttcctaccccctggaagtgaagcacggccacccgacttgctttggccaaagaaggtaaacattatggcttctgagtggaagtatttagttactggcacaagacttcccaatgctctccctgccactgtcaccgtgatggtccagaaggtgacagctcctcatctcggaagccagagtaaggacaacaaaaagcagagccctcactgatctgagatcaacatgtcatctaaatgtttggttttggttgtttaggttgggggctggttgtcaccatggcccatcctgatggaactcagtagtcaaggggagaatgtacgccaggcggggaaaccagagatgcccagcaccccccagaaagtcagatttccttaagcccagtctgggatgtgtcacctggctgctctggcaaggtaatgtggtttgatagctgttgagctattgttgtaatgtcgtaacgtatttcaatggccatttttctttttctttttcttttaagatggagactagctttgtcacccaggctggagtgcagtggcagaatctcagcaatagctgtttttctgttcttgagttgggagagacttagctctgtgaggctcaggagaagaggcctggttctaagaaaggttggccaggccttttcttccacagccattttgcttttaaattcagccttccgggcatgtaagaacaaccataagagcttcctaatctgtcagggaaggaaaggaccgctgcagtggctggaaagtggtgcacaccgccatgcgggtcatcggccttcgcatattgtttctgctgagtagtcctgagtacagagcccagaaacctggtttgagtcctcactgtccacaaactcattgagtggtctgggactgactccatgtacatatcctgtactttgggaaaaaatgagtgagagttttgaagtcaaactgctttgggttcaaattcctcaatctgctgtgaccttaaatgaagaaccttaagtcctgtctgcttccattttctcatctgtaatgtggacttcctagaataacaggaactggccagtagaactgggagaagtgagtgactaaatggatgaaaggcctgaacccggctcctggcaaggagaatgcattgatggtcagtagcatcttcatcatcttcatcatcatcatcactaccctgaccagatgggggtatttcacagtctttttttttgtttgtttgtttttgagatggggtcttgctctgtcatccagactggagtgcagtggcacgatctcggctcactgaaacctctgcctcctgagttcaagcgattctcctgcctcagctctcaagtagctggggttacagatgcctgccaccatgcccagctaatttttgtatttttaataaagatggaatttcaccatgttggccaggctggtctcaaactcctgacctcaggcgatccgcccgcctcggcctcccaaagtgctgggattacaggcatgcaccaccgtgcccagcctgtttcacagtctggtgtgaatataagatgcagatggctctgagtaacttgttcccaatcaccaccccacctaccctgtgtgcctcagagttccctgtgcctcagagttcctcgtgtgcctcagagttccctgtgcctcagagttcctcgctcaggaccagcgccaaaaaggaaattgacaaatatgtggtggattcaattggttaaatggctgatctccaaggtgtgtcccaaacaaaaccaacaacttcccaagctggtctcattcaacaatgttgctgaatgtggtagtgttcataaaattccaacacaagtagttccaaaaatgaaaaatacaccaccaaatgccaacaccacaccaaaaccaatggcaaataccaccccccttttttttttgagatggagttttgctcttgttgcccaggctggagtgcaatggcactatgtcagttcactgcaacctccacctcccaggttcaagcaactctccatcctcaccctcccaagtagctaggaatacaagcacctgccaccacacccagataatttttgtatttttaggagagatggggtttcaccacattggccgggctggtctccaactcctgacctcaggtgatctggctgcctaggcctcccaaagtgctgagattacaggtgtgagccaccacgccccaccagcaaataccctttaccctcatctgatctacatatgagtgaacaatcaattgatctgctgtatttcccacagcagatcattattctcatcagagtatagacataatccaggagtgctgtgtttcagtgtggccccgaaggagttaagtgaaataaagaatattatcaatattgtatcagtcacagatgagaaactgcataccaggatcagtgtaattcattcattggtttatggacaccgggtcctccagggactgtcacaaatccacttgatgttcctgagtgagagatttagcatttggatctttgatttagctgaaagatgtgtaaaaactcatgcagtcagacaactccctacaggcgattcatctctgttggcttttacgtaacagttattccaatcaagtgtcagcagtaacttaagctctgtaacttgcctctgaattcacatttgtgagatgctgggacatgaagaaacagtggcagggacaagaaggcccttctgggagaaggaagccttcttgctctttttgtttctttggaagtggcagacacacctggggagttagtgttctgagggaggaggcagcctctggcttctgaggctttggtcttgcatgaggtcttgtgtttcttgtgcagagtgccaggttggggtggtggggggagagcatgattcctgggagacaggggcactgagggtcctcagagcagctgttggggtcttacaggaacctcaggtccacagctgctccctggctagctcagcagggacggaagatctgaagacctgcatctgatcggttaacccaggtgagaggcataactctgaagttatgaccgtatggatagtgcttagcggtttcttctgccagaatttctcctgtgtccctcaccacagaggcctctgtcctgcactaagtctctttgatatctcatcacctgtgtcaaaagtgaagggaggagagaaggccaaggattgcttgtctcagtgcctccagagagagtgaaagtgcaagtggaggctggctgtggtggctcacgcctgtaatcccagcactttaggaggctgaggcaggaggatcacttgaggtcaggagttcgagaccagcctggccaagaaggccaaaccacatctctactaaaaatacaaaaattagtcgggtgtagtggtgcacacctataaccccagctactcgggaggcggaggcaggagaatcactggaatgtgggaggtggaggttgcagtgagccgagatcatgccattgcactccagcctgggtgacaaggtgagactctatctcaaaaaaaaaaaaaaaaaaggccgggcgcacggtggctcatgtctgtaatcccagcactttgggaggccgaggtgggcagatcatgaggccaggagatcaagaccatccttgccagcatgttgaaacaccatctctactaaaaatacaaaaattagctgggcatgttggtgcatgcctgttatcccagctactcaggaggctgaggcaggagaattgcttgaaccagggagtcagaggttgcagtgagcagagattgccccactgcactcaagcttggcgacagagcaagactccgtctcaagaaaaaaaaaagtgcaagtggactgttctgtggataatttaagatagataaataaagcaatgcaatggcctatccacatgaagtggcctccagtatcactgttattaacagatgatgtttaagatgtgtttggtgagtgctggcccatgttggagaaagcccttccgagaataaagcattcattcctcaagcaaacttgaaaagaaagctcatgaaccatccccattttatagagaaggaaactaaggtgtagagtggttcataaattgagtaaggtcatacggctggtaaaatggcaaagctggacttcgggaccgactctgttgacctccgatgcgatgctcacaaccactgtgttagctcagttttgtagcatggtggagagctatgccatctcacccatcaattgttgagggtgtttgcaggctggtgaaggggcagtcaggcatttccctgggtggagagtgggggcggctttccagcttcctgaggaagcaattcacaggcagttcagctgtgattatattacaggtaccagaggaggaacctgtggagacatctccaagcaaggaaactggcacaaggaccccatcatgctgggctctgagctggagggtccagagtaaggtgttgccaaatcccacattcaagttccctctcacagtcaatgcttgccttctagccagagaagaactggcggtgagaagcagacccactgaggcagtacaagaaattagccaggcagatgacagctctgaaggaaattacacagaaggcagcgcagaaagagctggaaaacacaaggcactgagatgcctacaggatgaagcgaaggtctttttgctgttgtttgtttggttttttgattttttttttttgagacagagttttgctcttatcaacaggctggagtgcaatgtcacaatctttgctcactgcaacatctgcctcctggattcaagcaattctcctgcctcagcctcccaagtagctgggattacaggcacccaacaccgcacccgactaatttttgtatttttagtagaaacggggtttcaccatgttgaccagtctggtctcgaactcctgacctcaggtgatctgccttggcctcccaaagtgttgggattacaggtgtgagccagcgtgcccggcccaaaggtcccttcttaatagaggttctagaaggatggaatggagaggagatgaaagtggcaatttctggagagattatggataagaattttccagacctgatgaaagacatgaatcttcagaatcaagaatcacagagttccaagcaggagatgaaaaataataaatccacaacaggatacatcacagtaaaacaacaacaatgacgacaaaaaaaaaagagaaaaacattagcctaggtcaaaagggtatttattaaagagacacgagggagtctttggggctctggggcatcgtcaggcagctgctgggacctcagtagactctgtgaccagtggcacagtgcttcctcttcagtgtcgtgttttctgtttcctactctaccctgggacttgagagtgtgcaagactgagcagccaacacctacaggggaaggcgggaatgaaacccagcaagaaaaggtccctccatccttggtggtggttctgccagcctcacccacacctttgatccagaggaggtggagcggaaagggacagggcctcagccacagcagacttgcatgcatttaccacttaccctttgaggaagagagccgggagtggtccaggaaagaagtctcctttttcttgtcaaatacccattaggtgagacggttgtgtaaagcccctggcacatagtacatgctcagtaaagccaagagaggcgtttgcttgagagcaggtactgtgcaccagcagtctctatgtgcgacagtcagttctcaccaggagctgcttgagagggaggttctatcatccctatcttacagagattgtctccttgctagtgaagcccacagaggtaccagaacatgaactcaggcagtccagtttcagagtggtcatgaaatttaactttttttttaaataaatggaatctcttctgtcacccagctggagtgaggtagcatggtcatagctcactgcagcctcaaactcttgagatcaagcagtcctcctgccttaccctcccaagtagatatgattacaggtgcataccacttggttactttatttgtagagatggggtcttgctacattggccaggctggtctcaaactccaggcttcaagtgatcctccacaccttggccttccaaagtgctgaggttacaggcatgagccactgcacccacatgaaattttaaatattttctaaaggaaccacagagctgtcaaactgtggaatagggtaagtgcataaaatgacattttggaaaaatgaatggggacgttttaattttacatccccagaattcaacccagccatgtgtagggaacacctaccgtgtgcataatctgctttcaatccgagggagtgacttcgggcacagcttgtccacaaggtcagcaagtggcaggggtgagggggtagtgaaagtgagcgctctcgtgcgatggggaagcccggagtcctgggtcctgcgtgcatttatctcctctgctggccccggggagctggggacagctcatatgcagtggcttcctcaggctccagtgttttaagagccctggcttgaagcagttccatttgggagagtttctccctagcatttggtatggaattattaccaaatgctagagaggaaccctgccaaatgctgtatatcagctaaaacccacactcctaaacaatgaaatatttataataaaaacagaccccggagaggggcacgggctggggcgctcagctgctgaggggctcatggctcaggtgttctgagtgggtcttgcctgctggtacaggtattgccgtcagggcagcacgcgccaggcagtgcggggtgtagctggaccaggtctagctcatgaagagaggagaaactgtgggtcttgccatcgcctcaagccccagaagacacagctgagcttcttcctccctagaagccctcctcccctcctcgtacagtgctcggcattcagcaggcactcaataaatgctgcctgcccgcaagcgtggatacttccagtaacagcaaaaccttgctcatcaggaacccacagggaatgggatccagacagctgagttttcgagagggagccgtaaattattttcatgtaacattttcagatggaaatatctctaagatgcggtgaacatttcccttccttcttgcttggagaatgtggaacaccattaacctttctgtaatggcccagggttgccgctgtgaacctccgctgctgagcgggaggtaatgcagccctccgggcttgcgaggtgtgctggggtgtttgccctctgctaatggcctctgttctcggagcttccttcagtctcacggccgatttcctagagatttttgagttcttccctcgccatcaggcctctagttgtcactgtcatcggtgtggtcatctctcccttcctaaattgccatttctaattggctgtggactagaaaccagaactctaggcttatgagagtgactgtgaagtcagcattcatctgctttgatgaagcatctgataggcctgagttaagggcagaaccttcaggctttgcagcccctgtgccggccatggagagtcattcttgtgtttctccttgatttacagccacagttcggaaaagggaggctacagcctgagaggtagctgctcttcatctgagttgcacagaaaaccctgaacacacttatcacccatctctaaattccctacggacaccagagcttgcaaactgtttcaagagaaccacactgcttatgatcttcaccttttaacaataaacaaagcacgttgactattgcttccctgtttggaagatcaggaaattgaggctgaggaagagatcacaggagactgattctatagcttggagccacccttaggtggggatttggttagagcctgaacaagtccagattccaggaggaacaagatgcatgggtaagtggtgcctgagggtgtctgaaacagggcatttacagcggtatgggcggggctgagggaaccgcagtggatggagagtctcaggggccagcaactcgggaggtcattctatccctctttgtgtccccagttatgagcacagggactccatatatggcaaggggaagggacagagtcctaggacatggagttccacgagggggcagcccacaggagtgaggtggtagccagaggagcccagacattcccataccatggcctgctgggggttaggtgggggaccccacactctctttcctccggccctccagcctcttgctggtacctcccattgctgcactgatcttcatgatcatgcctgaggacaaaggagtttggggttggagtctgcagacatccaagcggctcggcctcccggggcccagcgtggggcacaggaggagggaaagtagatcaggatgtacgcggaagaatcagcacagagcctgacatcagtgaggttgtcccacatcagcacaggctctgcagatgtttccctacggcttgccagctctgcccacgagcactcgtcctgccaggtgggatggctcggctgttggtgaacctgcaggcttggcagggcctctgagacacgtgccttatctccacggcagagaggcaaattgtgcgtaagtcctgctgtaagccttctagaccaagctggctgctcctcaccccttcttcctttccaacttagccctgcttagctggaaagatcaggcaggaggagggcagggtggagcagtgggaagtgcacacacgagcctggaaaacaggctcctggacctagccaggcccacctcttcctcgcatatcttccctgagctctcagtttctgcatcagtaaagtggaataatccatccccaggcttagttgttgtgagggggaaggagaaggaaggtgagggagcccttgatcaattctaagggactgtgcaagggagagatgctgagtttgaggttctcattgcctgaggaaggatttttttttttttttagatggagtcttgctctgtcgcccaggctggagtgcagtggcacaatcttggctcactgcaacctccgcctcccaattcaagtgattctcctgcctcagcctcctgagtagctggaattacaggtgtgtgccaccatgcccagctaatttttgtatttttagtagagatgaggtttcaccatgttggccaggctggtctcaaactcctgacctcaaatgatccacccgcctcaacctcccaaagtgctggggttacaggcgtgagccaccatgcctggcccccttctttccttctgcagagggaatgtattggtccattctcacactgctataaagaactacctgagactgggtaatttatgaagaaaagaggtttaattgactcacagttccacaggcttaacagggagcattattgggaggcctcaggaaacttacaatcatggtggaaggtgaaggggaagcaggcaccttcttctcatggtggcagaatagagagagagtgaagggggaaatgccacatacttttataccatcagatctcgtgagaactcactcactaccatgagaacagcaagggggaaatccgcccccatgagccaatcacctcccaccagacccctcctctaattccacatgagatttgggcggggacacaaatccaaaccatatcagggaggaagtcctatgggcctgtagggacttatcaggtgatcaggcgctgggctatggttgggattggagggtgggcagaacccggagagtggcctgagccagcccacccacctccagtgctcagcaggtggtggggggttccctcacaactctgtccaaagcacacctgggtcaggtgtttccctctctcccatgaaccgctctctgtcctaccttccccaaactggaaatataggtgtttcgttgatttaaaatatttgttccaaggcatggtggctcataactgtaatctcagttacttggaaggctgaggtgggaggatcacttgagcccagggatttgaggcttcagtgagctatgatgttgccaccacactccagcctaagtaacagagcaagactctgtctctgaaaacaacaacaacaaagtttgttaatatgcccattgtataaaatttagaagactctgaaatctatcaagaacaaaagttaaatcacgattaatcccaccatccagaaacaccattaatatgggggtgaatttcttcccatacctttgtttttgtatttttttgcatgtaaaatttacatgcataaataagtatgcatgatgcagttagagaaaagaggctgcaagggaactcacccacgtgttaatagtgattgtcctttggttaattcacagggaatgtcgtgggtcacatgcacgtcttcagaacgagcatatttatagatgcatgcataaaacaggcattgtgttgtcaataaagttttgtaccctgcttttttttgctttccccatctgctaggtctaattaaccaaataattttgatgactgtaggttttcccaaattctaaaaatcgtcgtctttcactggacactggtgttttgtggaatgtggtatgcattcgttcactcactcactcaagagccacacgctgagtccctgtgaggtggcagctctgtgctcactgctgaggacaccgagaggaaaagtcccgtccctgcccgtggagagctcctgctttaacgctaatggccaggctgaggccgtgcatagcagactttagcacgaggactcatggagtgtttcttgtccccacggggtgcagcccagagctggatgtgcaccacactggcgtgcagccttcactctccctgaccaatgcaaatccacccttctctctttcacaacatccatgtcttagatgatacttcgcacccaaaccctccacgtgcaggcagcctgccctccccctttctcccccaggaaagccctctcttggctggtgactacattcacaaggtcaaggactcgagttgttcatttcgtctttaaactcctggattgtgacttatttccggtctcccaggtgtgagattgattcttttttttttttttttttgagacggagtctcgctctgtggcccaggctggagtgcagtggcgcgatctccgctcactgcaagctccgcctcccgggttcacaccattctcctgcctcagcctcccgagtagctgggactacaggcgcccgccaccacgcccggctaattttttgtatttttagtagagacggggtttcaccatgttagccaggatggtctcgatctcctgacctcgtgatccgcccacctcagcctcccaaagtgctgggattacaggcgtgagccaccgcgcccggccgagattgattcttaaaggtaatcttttaaatgttttcctctgggactcggcttccagaatctcagttctgatgtgttgcttttcgtaatgtaacaggacacattcttagacggggtgggagagccagcgacagaattcgtctggcaaacgttgtcttatcctgggtttatccaggtgtgcagctctgtagccactgtgtgctgctgaggcgacacttcctcccggggcacagtgggaaatgtgttcctcctgtcctctatggtagatgcttctcactaagcctgggacttccaagtggcagagacatatcttctatcgttagaaaaccctcacttgcttatgtactcagcctaaagcccaggtaggttagaacagaaacatctgagggtatcgtgcaagccctcagctcagaacattgtatctgggccgggcgtggtggctcatgcctgtaatcccagcactttgggaggccaaggcaggaggatcacttgaggtcgggagttcgagaccagcctggcaaacatggtgaaaccctgtctgtactaaaaatacaaaaattagctaggcgtggtggtgggtgcctataatcccagctacttgggaggctgaggcaggagaatcgcttgaacccgggaggcggaggttgcagtgagccgagattgtgccactgcactccagcctgggcgatagagtgagactcagtctcaaaaaacaaaccaacaaacaaaaaacaaaccaacaaacaaaaaacaaaccaaaaaacccaaaatcaaaacaacaacaagaaaacattgcatctagcttcctggggtgactgggtgggtttcattcacagtccgggcatcacagccatggcagcagatggttgcttgtaaaggcagtgttgtgggggtacattcaggggggatgtagccataacctaattttgggggttaacttcttttgttttttgagacagagtcttgctctgttgcccaggctgaagtgcagtggcatgatctcggctcactgcaatctctgactcctgcttcaagctattctcgtgcctcagcctcccaagtagctaggattacagttatgtgccaccatgccttgctaatttttgtatttttagtagacatggattttcaccatgttggccagactggtccctaactcctgacctcaagtgatctgcctgcctcggcctcctaatgttgggttaacttctaactactctagtgattcagctgattgctgctgctagaaagctggactttttcttacattagcaactgtgtttccaccagtcaggatcaggaaggccaacttccctgctgtacttgtgaaaagatgaataagtaattcataaaatatctgtccatagcccaataggcattccacagagatgacagaagacaggcaaaggggcaagagggagcccagatgcaatgcagtccccaaatcaagttcccttttgtaaagtgcgtcacctgcaaatgcctattgtgaaagagaaagcgcatcacccatgctgtgggttcctgactcaggctgatggggaaagccaaagccatttgtgacaaaagctaggtgacaggggtaagccactggtttgggagtttgcagtgaggccattctgaacctgcaaaaccagatctgacagtctaaacgatttactaacaggaagtgctccggatgctgtgatggacttctgtatttacgttgaatgagttgaatgaatgtcataggcagaaagaactgctcactagggggccgggacagaggctgatggagattcccgttagccaggtgtggagcggagcctccagggcttgccaggtatgctggaaacagaacaccacacaaacatctctacagccctgaagtgcaaagctaaataacatgggacattatgaaaacgactgtcattcttatttaatttagaaaatccacataaaacatgtacacatcatgaataagaatagtaaaggcctattatgtaccaggtgccatgctaagggctaatccactgagttctctaaacacgctcttttttcttatgtggaggttaaggcacagagaggttatgtaacttgcctaaggtcacacagctctaaaattttggagctgggatttgaacccaggtggtctggcctcagaacctgtgctctgctgctttatggtattctcctccccttctcttttagagcaatagaaaaatcaccaccattggcaaaagtaactcgaggagttagcaaggggtgaggggtctggggagatctagaagcagagcttctgagtgggcagcaggcaggggagttggagccctagaatgactatatcaggaatattggctggacacatacctcccttggatacacagcccatctggagctaaagcaaagagatacattgttttatttgaagccagcaaggttcagtgggcactgagagacatccctggggttccctagagctgaagggtgagccggggacaacaagaacctgttgaaaatggcaccaccatcagaattaaaagtccaactaatttggagcaatagtgactgcctaaggtttatcatcctcttatgagtctgtaaggtaagccataaagcctcctgtgcataaatgggcaaaaggctggaggagacacaggaagagaaacaaattgggaagaacaagttggggcagcctttttggaaagaaagttggcagcatctaggaggggccccaaaaccttcatatgcaccgatccaacttcacctctgtcagtggattctaagaaaacaagcagagacgcaaacaaagctttaaccatgaaaatgctctctccaatacttctaagagaacaacaacaacaacaacaacaaaatagaaacaatttagatgctccaaaataagaggttgtttaaataaattatgttgcatccatttgatggaacattatgtagctataaaatcatgttttcaaagaatatttaatgacatggggagataccttgtgctacaaggttagagaacaaaagcaggacacaaaattgtttataaaaatgattcaaagtttgcaaaaaattgatatgcacagaaaaatgctcggaaggaaagatacaaaaggctatcagggtgagattaagaaagatataatcatctttgtacattcctgtgttttctaattattcttcaatgtgcatcaaggactactttatatcagagaaaagaaccattaattttaaagtgttgcaactaatttctagtggtggcaacacattttaagcaatgctgttcatatgtgcattcattcattcattcattcattcattcattcattcattcagtggtcagtgtaggtaaagtgcttaaaacagtgcctagccggttgcagtgaaccgagactgcacattgcactccagcctgggagacagagtgacgctccgtctcaaaaaataaaaaaacagaacaaacaaacaaaaaaatcccacaaaaaaacaacaaacaaaaataagtgcctggcacatagtatgaattatttaagtgttagatatgattcattaatttcttttttttctttttttagaggcagatatcttactgcgtcatccaggctgtagagcagtggtgagatcacagctcactgcagccttgaactcgtgggctcaagcaatcctcctacctcagcctcctgagaagctgggactacaggcgagtgccaccagacccagataattattattatttttattttttttagagacagggtcaagctatgatgcccagactggtctcaaattcctggcctcaagagatcctcctgcctcagtattagtttcttgattagttccatcaacatttcctaatgatctgcatggtgccagggattgggctaggcctagggtctggtgatgaaccatgtttggggtctgccctctgagaagtttcgagtcttggttagaaaggaagctcccacaagcaaagtcttagatggcatccccgaaacagcaactgtagccaaggtagttccacagatctggaccctcagagctagaagaggaccagaaaagctggcatggatacaaccatatctcaaacactcacccagatgaaaaaatttgtcttcggtcaccaatgcagtttcatacttaccctcctatacctttaggggccagaccccaagtctccatctgctagctgatcatcccaagtacaggttgcaaggaccccctgggggattttgtagggcccatgggatctacagcactcaggaaccttgggtgcaagtgcagattcagcctgccagagactctccagggatacaagctcagcccttggggccgcccctcccatttcccctacaccgcaccatccaattgcattttactcctctcttggagcctggcaccatcaacatgcatttgaccttcagcacatatctctttgctccgaggcttccctttctctttcccccaaatccaccagactcgactaagccctttggtggaatcaggatttaaaacaaagcctctatagtgatggtccttccctggctcctggcccaccacccaccctgagctccagtctgttccctgtacaggcccatggccagctctccatggaagcgggctgtgacacagggctctcaggcactggccagggtcagggacttgctttttgcctgactttttcattttcatttgttttcaagttgctacctggtagagaaatgcttcctacaaggcgataaagctccgtatttacccgtgtaagtcccggggattgttactggtgattctgttcaatccatacagaccaggtcacatctatgagccaaagggtaactgtaaccttttccaaaaaactatattttataaatatttgctccctttcatttgtagtggcaagcaaaatttgcacttcttccccaggtaaaaccagggctgaaaattgggactttggaaaagcaaggggccaggtcacagccatgtgctgcatgatgcgcacatttacagcatgggaaagggagtaccagagaaatcaacatcttaagaaaataagttctgggatccccaccatcagtttcgtctcataacctgatattttgtttcagttacaattcagtacaactgaattgtagtctcaacagccccccaaatttagaacttactatgggctatttcattgatttctcctcttcaggaaaacaaagcacaggccacattctggtcagaaagtccgctagcttcataacatttcccccaaacctaattcaaaaccgatgatagctgttgaagacaactgcagggcccagagttgatggtccaggatctattcaggacatttctgttccacagccttgcaaaggagtgggtgtgtgaggttgtaattatactcaatagacctcagcacattttttgttgttgttgttgagacagagtctcactttgtcactcaggctgaagtgcagtggtacaatcttggctcactgcaacatccacctctggggttcaagcgattctcctgcctcggcctcctgagtagttggaattacaggcacacaccactatgcctggctaatttttgtatttttcgtagagatggggtttcaccatgttggtcaggctggtctcaaactcctgatctcatgatctgcccgcctcggccttccaaagtgctaggattacaggcgtgagacaccgcgcccagccgctcagcacatttttttttgcatttgactaactcatacaaagacaccaagaagacatccacattggtcctgctttacaataaagcctgatgtaggaaaattaggattataaataaattactgttaatttgttattttaggacacgcccattcattttacaaatgacattgtctgttgagatgccttaaataaccagctcttccagtgcaatcaggttcaatttacaaaaatttactttataagcatctcttctggcacagagctattaatgcaaagcaaggtgcacctgtagctttaagagaattctggtaagttctttgcccattcactggaaagaacaccagggaccatgctttgcttttctgccccttgttccagccttgtttttgagcgctctggtccctggcccaggtgttctttgttcttgtcaggtgctaactattatcagatctcattctgtggcaaatagcagaaaacccaaagtaaactgaattaagttaaaggaagtttatccacttacaaaacagaaaggtgctggggtggagctggcttcaaatgtggctggattcagggctcatacaaggcaagcagcaccatttctctatctccatcctgccacggactgtgttggcacccttctctggctcctcttggtggcccctgaaaactctggactctgttcttttggtgctgggatggaaactacagttctccagcagtttaacctctccactagcacctagcaaaaaaaaaaaaaaaaaaaaaaagtccaagattcactctgattggaccaacttaggccatatgcctattactgaatgacagaatccagagagatgtgatgcactgattgcctgggatccggggcaggacccccacccagatgcccgcaaggcaggaagggaaggtgaagctgttgctggaggaagggacatgttccgccaggacaacacgaatcactatgctgacttcttccctctgttggaaaaaccggaagaggtgtacaaccttttcttgagcttgtggggcagcagcaccctgggtctgggaccaacaggtcatggcagaatagccaaacagatcagatgcttccccaatttcttcttattcaggaatcacctccacctctaagggcacccttctgaatcatgctctcagggagtctttgaagggtcattcatactgcattgctcatgacagaaaaggctgcaccttggccttggtggagagacaaatgacccctgcagcatagaaaaccctttttcctagtgcaggacaactccttgctgaagccaggtagccttcctcccagtaaaggatggtcgcctactcccctgagatggaaaagcagggttctccatgggaggccacctgggaccctgtggccatgcagaccaactccccacctaacacatgggccctttgcagacctagcgtctttcttctgcttgaagaagggagtcataacctggggattaggggtatcattgtgctaaaaccactgactgtgagtgatcaaaggggtattacagatgttggaggtcatctttatatagatggaaaaactgaggttccagaggagagggaacttggcctcttgattcagaagtgtcctggtccacccttccatcctggagccaatgtagccctcttgggtaccctccctgctgcttttaaatctgtctatacagcaagtcctcacttaatattgttgatggattcttggaaactgactttaagcaagtgatgtataatgaaactagttttaccatagattgattgatacaaacaagagttaagttcctacagcatgtctctggtcacaaagcttcaccgcgcttctacatgtctaaacattgaaataaatatgagctatacatacatttaagagccattaataaaacaagtaagatcattacttaccccagtttttgatcaattagtgagggtggtcatagtagtaatgggttaagtcaaagaatacatgtttgcaaagtgaaaattgtaaggagtacctctcaccaccaccaagttgaaaaacaaaaaatcacaaatatggtggactcaaaatatgtgcagtcgaaagtgcacaactatgagcacttttgtactgtactgtttcttggcatacattagtatgattatcatatattttatgtattttatttgacaataatttatattcattcattgtttcatgttccagcctgatgattccagttcaccatctcaaggggctggagcctgtcttagcaactcagggtgcagggcaggaaccagccctggacaggatgccatctcattgcagggaacactcatacatatacctacactccctcgggttggcaccatgcagacatggctattcacctaccgtgcatgtctttggggcatgggaggaaacgtgagtacccagagacaacccacgcagacctgggaagaacgtacacagtccgcacagatagtggccctggctggaatccatgtttttttctcattacattataaggaaacaatgttgaaggaaacaatattataagaagacctggtgtactatgaaggaggcaggattataaggagcagaagagagtgaagggaaaagaatagcaatatacaaacaaacaaacaaaatgagtagtgttgtgaccaggagtgcaactccaaagtaatggtttgataacattttatgaatcactgccatgtttgaggcgcgaatgacagaggtcagaacaaacctattggtgtgatcagtatcactttcaaagtaggcactttgagtgattgaacgcttcttataaggagctgatgggctccagcctggtgcagcgcttcccagccttgcttttgagctggtccaggagtcaccaaagaactcatttcaccaccttgatttttacccacagccaccacccacctaactcatcatcccaagttcccagtaactttcatcagtttcaagaaattaaatggcgggagtggccttgaggattccgcaggagtggaaggcccgggtcaacgtcccctgggtagggaggggctgcccttagagacagcttcgagtactgaagagtgcaggactcttgggcaggggaggggtgggcccatgggagcctctgccgaaaatccaaggggttccagccctggccaggcgaggcaggggcagcgagaaatactcgagagtttgaaaaggaagagcagagagaggccagacccaagggaggaagatggggaccccgagaaatcctggatacggggaaaagcataggagagccacaaattatgaaagcggccacaaaacacccctggtggggtggggctggtgggtggggagccagtggggaacttttatactttaatgagacgcaggtaggcgtcaagtttcggcatctggaggataaggggcctctgtccattttctggaaccctccacctcccactcccaacaagggccgcgccgggaggtctccccggggacccccactcagcttgctcaggtcctggaggcatgcagagggcgtcggcgccgacagggggagccggagagccccctgcccggccgtctgcggggctcaggcggggcttggcctccgatgagcgcgctgtctctgcccggtgggtcccaccccgcccggccacgcaaagccgtggcagccccctcgcggcagcgcgccccaggcgaagcaccccgggccaccgggagcgcggccctcccgagacgcacgggctccgaggccgcagaagccttgggcctccaggcctggaaggggctcccctggcctggaggccatgggcccggcccagaccggccagacaccgccagggacccccagaacgacgccaggacgcgcgccgggctccgtgcctcccacggcccaggcgaggccggcggctcgagggttaaaaggcgacccccattctgtaggggagaaagtgccttttctccaagtccatatggtcacttcctttcgacctgctcggccctgctcgcctctttgtccgctctgtcacttataaagaatcacttgacttacaataacaggttcaaaagacgacggagtataatcagttgatccacgaagaattggaataaagaacaccccaccgctcaggctatcattcccatagagatagtgatatcattcatgtgattgcgatgctaatttctatacaagaaaaaaaaaacccttgtattttggtatttgttcaaagagaatttcagacacatcagattggaaaatgtgggctgaattcctaaacttttttgggtaggcagagaattttttaaaaacaccactgcagagatttgagcggattttaagaatctcctggaactagcttgttggaggaaagtgattatttcctcactcctccagtgcactcctggcgagagagagagagagagagagagagagagagagaagagagagagagagagagggagagagagcagcagcaaggagcgctgggttctcagggcagggtccgaggatgctggcagcggcaaggcccggtgcccgccgacggcgcgcctggggagaggaccaccggcggtgagggcccaggcccagcgcccagggcagctgcgacgcgtccgtctccaacgccggcacgctaacccagcgctcctcccagcgcaaagttttctgtgtctctcccctcactcttggactggttgcttgccaccgaatgactccttcagctggagaggggtggtgatggggaggctgtggcatgccttttctgtatctttgcttttgatgtcttgtgatgcccgggtttaaaacccgtcagtcatcttgggggagctcagttcgggcaggctggagcaagtcttacctgaatcaatgttttaagtgcccctgtggcttggcgttttgaataatcaatctgtctccatcacttcttaatcatgcgcaacacaggcctctctctctctttctctccccccacctcgctctccctccctgtatcctttttttttttttttttgtcaactcttttggatcctgtctctttgctattaacatgcccagtgtcacatgcgaggcttttctttaaaacaagcccctcattggtgtatctggatacttcttttattattattattactgaatcttttttcccataatgacaccaggatcattatataatcccataacaaagaggctttttgaggcaccagcttttgtcaactctaggacagagaatccataattgcattatccagctttttcctccttcttcccccctcctagcttcccagaaaaccaacctcatgccccactcacacccccaccttgttacttctgcttatattatttaccgaaacgtttgcccagaggacccgccttgcaaagttgccttaaaaaagttattttgtttgataattaagtcctggagcccatcgcatgatgattattctacacccataaggcagagaacctgcgtgacgtttttctcgaagtttaattaccgtatgctaatttccttgcctactacgtgattaattaaaatcatattttcataatcatttggcactagtattgttttagaattatcatgatctcctaaatagtgtctgtaaataaagtcgcctctaatggcaggcgcgggaggcgaggctgaggacctctccgcgtttgtatcgcggcgattggcaacataactgccttatttacattaaatacgccacaaggttacagcgcggatcaacgtcatttgatcgctgatgactcccttaaacgcccgggctgtgactgattcttcgcgtcccgctgtccaccgagattcacccgggagtttttttttttttttttttttttcctcccagaaaagaaacagactttaaatagtttcaggagcaggtaagaattacgctttttcctcgccccttctccgtctctctctcctctctctccgtggcagtctctctctccctctcggctggataaaaaattctttagtcaaaggcaggaatgcaaagtagtgacaaggaaggggctgatatatgtctcagtaacgagtctgacaatcagaatgtagctcttggagaatagatagattttaataagtgtgtttacatgagctcaaggtcagaaccaagctgcgctgtgttaaatggtttcttagttgctagacagagagaaaaaatggacgatcacacaccattctttgtagattattatatcaagggttcagtctctggctcatcaaagctaaatgccgcaagacctatctagttgctgtgaattatgccagggcgacaatggagagcgtttttaatggtacaatgcatttcacctaccagatagggggaggccgagccggggatggggatgtctgctggggctgggtgatgagtatcaatgaacggggcgattctgaaaagaggctgatgaaaatcgagcccgccctgccccggctgggctgggaacagttcgcagggctctgccgagtgggcgagtgaggcgcgcgagcagggcgcccgtcccccctcagccccggaaaatgatcaagtcaatcgtgtgggcatgtttcattattcattgaacacaatcttttacaacgctccgtttacgtgcccgagtttgctcctgacgcccgcgtttcaatgtttaaggtaaggaaaacaaaggtgggggggggatcgcggggcgcggcgcggtgcggggggcgcggcgcgggggggcggcggcgggtgggggggcagcttcggcgtccgggaggtggcaaagtgagtttggactcttggcgcggcccccccgtcccctccccctccccatctcggcgaggcctgccgcccggttccttctcgccccatcgcgattaaaaaatacggtctaattaaatatccgtggctgtgacgttggcgagagaagctgtcagcgggtggggggtggggggaaagaagaggaaaaccgagccggcggctgcggccgggcatcgtatggcgctagagaacttcggcggcgagcgggacctgcgcctgggccgccgcctccccgcccgcggtcccgggaccgttactttgaaaaggagtcccgaggcctggcgcccggcgcgcgatcgggaccccgcgtccagctccggggacccggccggcgccccccacccgcgagcggcccgcgagccactctcaggccccgggaaactttcaagagggtctggggggtggggggagtaaaaaggggagggggtaggctggggccgcggaaacttctgctcaagtgactttccccattttctcctctgcctgggacgggggttcgccttgcgctctttctctggtccgcgctcactgcggggttccggcccctccgcccgtggagagagggtaatttgcaaccttttttttttttcaattaaagttagctgatgcttacaatgtgtcaaacttgcgggcgccgagagccgctgagatctgccattttgtgattgcatcggcctcctgtgccccgggagcctggccaggctgaggccggagagttggtttcagggctgaggtgccagggtccgaacccgcgaccccaggaaaggccgtggcgcctgcaagcgcaggcggcgcccgcagcacctgccccagccgggcctcggcctgggggcccagccgggggccaaagaggaaataaataaataaataagtaacaggttatggagggaaaagagccggccagtcccaggctggagaaatgaggccaatcagagcgaggaagtgcgggcgtgggggctctggaaggcagaggagaggcagggcttgcgcggcgtctgggaagagtgcaatctggggggacgcctcccgtccccccagcgcagatgcatgactggggtaggaatgatctttgctgataagcctttttctgtttgcttcaagacattatttttcgaagatgaattgaggaaaacagtcgtaggcgagactcggggtgtattttaggcaaaaaaaaaaaagttagggttgggggagagctttcctttgatgagtaggaaagtgtccagatctcgacgcgcccatctgttgcagttttgcaaataatttaaaatatagatatctccatatagacggatgtatgtgaagtggaggaaggtcgaaacgcggggaagttagggaaaaagaaagaaaaagggctgggcagagagagacctgtgttgctcactcttcactctgcggagtgaactccggcagggctttctttggggacaggtggaaagttaagtcccccccttttcacttctgtattgtgagtggttcctactgtgtgcctgttggagaacatgtccaccgttcccgagttaggtggaggattggaatgttggggggcggggagcgttggagttgaggacgcagtggccaggggctgggggccgagaaagagcagggcggggtctcagccccgcgtgcgggtggcagcggcggccgggttttgtttgccagatattgttatgtctaacgggtgcctcgccggagacgtgatttgtcagccgccttcgttttcactttagcagaaaatacggcagctgcgaggtgtcccggcctgcggggctcgggcacccggtgcgtcctgggggctgggtcgtgtgcgcgggtgggagccggcggccggcggggccggggcgaggggcgagcgggaggggcggagtgagcgagcgcgcggtacggccctccggttcctcctgcgccttctcccggcagccgccgccgccgccgccgccgctgtgcaatttagcagaaatccgacaggggccgcgtttgctgagcgcatccggcggccgggcagcccgagcgggccgccgggcctggtcggccggtgtagaggcgcggagggggccggcggaggggaccggcggggatgggcgcgggaagcacgcctgaccagagcacgcgccgttccccaaccctggtgtccccggcgagttgggcagccccgcgcgccctgaccttgacgccccagtctccagccagggcttaggtgaacttggggtggggtgtgcgtgcgtgcgtgtgtatgtgcgtgcgtgtgtgtgtgtggaaggggtggtgagactgggaacgcgctgttttctttcccagtttgatactagcaactggatttttactttaagaccggctttgctctctgctggggttgggagggggggcgatcttttcccatcactcacatctttgttcattgttcactgagtggaaggcaggcgacttaaagagacgaaagagaggaaaaaggggtgagagacggagagaggaaaaagaggggggcggccagaagagggaaggagaggcgtggggacagggcccccgcccccgccggggtcgggtttgatggtgaaatagtaaacccacgcacggagggtcgccaggaaagtggacattaccgctttaattaacttcgagatgctccggcggcgggacctggcgtagccgtgacgcgcccccataaatctgcccggcccggggctgctccgagaactcgtacagtagcggcgtcagatccatcccgcgcctcccagtccggagtccatttgcataattggattttttttttttgcctccttctttctccctgaaacttgtttgaaaacccaagtgaaaaccgcgacgatctgcacactcaaaagcaagtgccaagtaagtgccctgcggtggcctcggcgcgccccggggtgagcgcgcaaagccgggagcgaggtgccgcgagctgcgcgccgccccgggccggcctcgcgtgtgggcggctgggcggctgggcggcgggaggacggcctccgcgggctccgggactgcccggctggctgctcgcacaactttttttttttcccccgtctgctgacttttcgggccaggtgaagtgtttgggccacgcgtgtacctgtggcgagactcgggaggcgatcttggggggcgcgcggtcgcagttgggcatcttgcctgggtcgggggcgggcagtcggtcccagtggccgccgctgagggcagagctgcgagcgagcggggccggctgctggtcgcgccgcgccgtaaatgcaagcctgtagccaaatgcttcccccattattctaaggtttgtgtctgcgtgtgcgtgtatgtatgtgtgtgtttgcgctgtgcttttaaacagaaagaaaagcaaccaaaacaagagcaggaagggctttttccttagctcgtcccccttcccccagcatcatttatttcttttgcttgaaggagagtgcagaccttctttgctaaagacagggtcaccgagagattgacaattctgttggaaatgccatcaatcctatagcgaaaatgtagctgcatttataaaataccaacccttgcctgataaggaaagtggtttcacagtgtctcaaattttattgaaaatatgtaatattattataatgattatttacagcgttcagaacccaggggaaaagtcgatttgcttgggggaagactagaaccctagttcttgtttgccggccagcctgggaacttgcctggggctgcgcccaccaccctgaaagctgctgcgggtggtggggggggctcagctttcagtccagggagtcgcagggggtcgcccctgcagccctctggcctctgctcggggagagcccagggcttctggctgaaggctgctttagttatgatgtcattctgatagcggagtgcaaatgtctcctgattccaccattaaccgcctggctgatttgcttggtaatgatagcactgacgtcctgctccctgacaaatgcagaaccgccgagccctaggaattaacttttccccccactgaggagaaacccggctgccagaagtctcagcactgggcctctgcctgtggactttgtctgcctcagtcccagacactgacatacatgacaggcccctgggctgagggacccgttttcccaaagtttagaaaacttttaagactttcatttccagaagacccttaatctggtcaaacttaagtgcgattgtgaccaggcagagatatttgcatgtgaccaatggcagggactctgagaccattgcatggaagacttgcctcctaccttcagccccttaactgtgtcttcatgttaatatcactgcaagtcagccggatttagtgttgatttttaactagtgtacaatgatttaagatttcttttgatttactgttcaaatgaaatttacataaatgtgatgaaaatgaacttaacatctgggcatatgaaaaaaggttagtacctcatatgtcatctgcagggaaagtctctaaaatgctttcaccctaaactgggtttggggaaacagttcctggagacataaatggtaattatggagaacctggagaaaacactttcaataaatttgcattcttttggactagagctctgaaagcccatcttgttctgtgcctggagtggttaacttctgagcaggctggagatcttcgcaactcagcaacttaactgctggccgggctgtcttcacggaagacttagggcaggcagggagcgacagtcacgctgttctggtccaagtcagaggccaataacccccattatgggagaggacagagaggcagctagaaggtgccgcccgacttcccacagttgcccatagggtactgaaggcagtgctgagatgtggaatcattgcccactgaaccccaaagagctgaatgattaggtttgtttgctttgccttaggtaaccaaagaaatttccatcagctccacgagcccattcaagtgaactctgaactccatcttacttttgagcaagagaagcttatctctggcatcaggaaatcagaattaaacagccttccccaaatgtggttgccttttgctcaaaagttggctgtgaatggcacaggtgtttttaaagtgccttgaatggagggggaagaaagacagcaatgatactcatgagaatatagatgaactttttttttttttttataagaagagtatcataaaagaagaaagcaaatagatttatttttccaggctgaatgaggacaattatagctttttaacatctttggatttagtgtttttaataagccttttaagtaagctgaaatatcagcttgcattttgttctcaacattatttaaagtgagacttgatgcaaatttaaaaacaagtgagttttctgcaggtcaacatttgtccatatgaaggagagaagcctcttccatggcctgtctgccaggacctagggcaggccagtgctcagccctgcctcagcctatctccaagtgaggccttagatttcggctggaaggacaggggtggtcaggtggcatctctcaggctgtgaaggctggattttggaatctaaaagcagggcacaaactcgcttgcattgctactagtggggccttgtgagtggaggggcttcctctgaactcacacctgctgtgcacactggcaccttctccagaatgtgccagggcagggtctgggctgaggctgtggaggagttggagggaagggagcagggccaatggggaggagtgggagggaggtctctgtctgcctggttgggctcacctgtgtgcttcatgtggtacctgctcgggagttggaagggaggccttttgccaaggagagggattggttgttcaggtctagactcttcaggctgccgtgatggtccccttggtggcattgaacgtccttagaggagtgagcagataatgtgtgtggtcagaatgcgctaagccagggagtggccccctaggttgtgctggtgatggtggtggtggtgatgtgtgtgtgtgtgtgtgtctgtctgtctgtgtgtgctggggaagggtgctgcctgttagaaatacttgttctgagatgatttccttttcatccacaattgtactatccaggatagactggtgagtttgtaatgtacatgtgtgttggaggggttggggtggaaataaatgaagaaatcaggaaatacaaaagaaaatgcatcttcagaatagagatgctaggaaacacagtccagttttctgaaatccccctcactttttttttttcccaaaagaaggcaaacatggatggaagccccctcaggaaggtgggctgtgcgggaagccatctggcccacctggggtgggcgtgggggcctcccccggccagttgatgccatcaacgggctcctgttgactgtgcctggtgataagggctgctgtggctgcttctgctggctccctgagagtctcctctcagcttctgatttttaaaaaataatttttcaacttttattttagcttcagggggtacatgtgcagggttgctatatgggtacattgtgtgatgctgaggtctggggtacaatgcatcccgtcacccaggtagtgagcatggcacccagtagtttctcagcccttctgccccgcctttctcccccctctagtgtcccccagtatccattgttgccatctttatattaatgtgtacccaatctttagcttccacttatacatgagaacatgctgtatttggttttctgttcctgcgttaattcgcttaggataatgagctttcacttttaaaaatcactgtagatctctggtctttctcttacagtggagtttttgctactataagcagcatcaagcacttggcttttcacatgctctgagcttgctcgaggtggggtttattttccctaagagacaagattcagatgagagtgaggtttgggtggaacttaacagatgaacctgggcatcatttctccagctcagggcactcgtgggagtccgtgctgtgcgttgtaggatgtttgggagcgtccccagcttctaccccactagatgccagtagcaccccccagctatgataatcaaaaatgtctccagacatttctatatctcccttggggagaatcaagcttatttcccacactttatgcgctgggccttgtcttgggcctcttcaggggggtggaaggtcagctgtggtcctacctttggggactgcacaagctggtggggagacagacaaatcccagtgccctgtaagtccagggggttggactgtgcactaaacaggggaagacccatggggtctgagagggcagagaacttccacatggatgaattgtatctgagcaaaggcatggggcccagctctgactgcttagaggtcaattgcacatggaggtggtgtcgggggttggggcggggggagaaccccatccctggcccctgactgtgacatgcaaactaagcagtggaaagcatagttcttaggctctgagtgagttgaggctgggcactttgctggcaggataatgatacctttttttttttttttaactttaagagatggagccttgctctgtcatccaggctgaagtgcagtggtgcaatcacggctcactgtagcctcgtcctgggttcaagagatcctcccactttagcctcctgagtagctgggactacaggtacataccaccacacctaggtagtttttaacatttttttttttttagagatggggtcttgctatgttgcccaggctggttgcaaacccctggcctcaggcagtcctcccacctcagcctaccaaagtgttgggattacaggcatgaggcagtgcacctggctgtccatttttgagtatttgctatgtgtaaggcacagctcctagtgctttacaccttccttatgatgcaggtactatatatgtccagaattcaggaaggaaaactgaggcaatgggaggggtaggtggtgggtctaggattagacccatcctttatgcctctggagttggcatgcttagctcatctactgctgcaaagcatctcccgtgacccacgttcagctgccctttctggggccagatttacagcaggacctctgtgatttgctcctgattctcaaagctcatccaccacaccctgacaccaggcttgggggctggtagggccaaagcaagcactctttggggtggaccaaagcctccaggtaggtggtggcaggaaggcaatgttgatgcttcaaatgcatgaagagatgcaggaaggaaagtcagtctataaggttccccctttcctctacctactattcttagtctatggctttccaatgagaaaattaagtgctgttatgacacaggagaaatgatcaccgtaggcttgagctgacattaacctgaaagttttctatctaggcattacagctttgattacctgagctgtgttcagttgggtctttgattacctaggtgggcctggctcctggggagtatatttctggccccctacctccttgctggctcttcagctggatgctgggaggccacctctccactgctgactctatttgtctatttgggaccactaggctccttcctttttttttttttttttttttttgagacagagtcttactctgtccccaggctggagtgcagtggtgcaatcttggctcactgcaacctctgcctcccaggttcaaggggtcctcccgcctcagcctctcaagttgctgggattacaagcatgtgccaccacacctggctaatttttgtgtttttagtagagacagggtttcaccatgttagccaggctggtctcaaactcctgacctcaggtgatccacctgcctcagcctcccaaagtgctaggattaaaggcatgagccaatgtgcctggcctcctttacattttttaggctttttgttgctttattactaaattacacacacacacacacacacacacacacacgcgcacacgcaccccacaccacgaagtagctttacttaggttgtgaaagcccacctaaaatcgagattaatcacagaaatgcccattcagccttaattataatgatggtctggcttgcatttctgagattccctcataattcccataaatttgaaggagagtttggttcatgcaagtaccagatcgtaggaccctcgggaggtggtattaattcagcagacattcctgcttgtggtttccaggtacaggaggaagggaaggtttggggctcttcggtgtaggtatggagaggtggccacaacattgacacctgcagtggccactattgggtggtgaccccatgccaggcactacattacacaccccgggtgcattatcttgcttagttcttttaatgccccagggaagggcctcccttggggcagcttccgcagtgggcaaactgaggggtgtaggaacttgttgctgcccatgcctgtggcatggccgagcgggcattggaagccagctgcattggcccaggaggcgcgtgtctcagccttgtttgcactcctgcctccctaaactgtccttagcactgagaacaaaatcatccttctgaataatgttaacccgccttgaaaaggaaagttaaaaatgtcaaccggaacttgctactttgagaacatatacattgttgtgaatttgttattaagagggagaaaatatttggaaatgctatgtcagctaacaagtaactatagagacagcaaacagatcacagcccacatagatattacatataaaatttaatctctttgaatagcttgatatttaattttatcttctgaaatatctagaaacacttatcccttattgactagagaaaaaaagtagcttacacaatttttgtgtgtggttattttcccaaaattttaattcccgattaaaatctatttaaatcaaatcaggcaatgtcttccaaattattatggaaaggccgtcatttatatgaagcctattgaaggggctgggaagtcttactgcaattagagctaaagtgctttaattattttgcttccccggccagggcccccagttttggggttgtaatctgttgatgccaagtggctatttcagcagccttaaatctgcaccgagcagagagcgtctcacggatagaacatggctggatctgttcattaaactcagtgcatggattccacagcatcagagaaactttattccccaacgtttccacccgaaagagggtcaatgctggtgggtgggcagtccccctccaacagcccaagaagagttcaaaaggtggaaaagtggtagtgtgggaatgcgaggaggaagaaaagcggccacatgccggcatgaaaggatttaatctgcgcagccgaaacctcctctgatagtggagggcttgcttctgtgctggtcttggcaaagccactctctcactgagtcctgccgccgccgggtactgaggacttgcatgtagctgggaacagtctgaagccacagcctgcctggagctctcatggacattgcatgcaccatttcttaagcaaaaagccagacactccatctgcaattctttttagagatcattggtttgacaacttcatatttattttccgtgtgatttttgttttgttttgtttcagcccccccaccccacccatttccttctttttggctttttcaccctgtgtgtacacattcatcctgaaagtattttgaaaaagcttttgttaaagttggggcggggggggggtacaattggaattttagttccatttaaaatttccatctattttgaaggcagaagaagtacagacaagataacatgaacatttccatcatctaaaaatggattaaggctgcaaggtagcaattttcccctttaataactactgccaccccaagaagacacagtggctttcttagtaggtgacaaacgattagctcagccagggtctggtcatctggttggcattccccatgacagtgccctgggatgtaacggatggtgatatggcttgtcctttggaggggggtggtagggatgtgtatgcccggcatgttggcatgtttgttctttggcgatggctgtctggtgaggtcaagtaatatattccagatattagagtatgtgccatcttccaaatgcttcctgaagaactggttgcattttgacattctgctcctttgtctcactgacaccagcaacttgatcctcacgtctcaaaatgttgacaggagctagattcttgtgagatttttttttttttcttctaggcactgcctggctaaggagcctggccactcaggtgaaaaataccaggcccctgtgtggatctgggggacagcaggagtctgttgttaagaaaactttttctccctttgcatgataatattgctcagatgaaaatcacacaatttttgtgtgatctccaaataccaccttcaataaaataatttgttcattgatctgaagaatgagtggtttccagctgcttccttccccgggacagactttcgcattggaatctgtctctttgactcacttctggtagaggttggcctcccgtggaggccattgtgaaagggccaggcagcctggggaggctggggatggagcccttgtttctctaggaatcagagggcttagcagaatcaaacacaaaatcataatatgataatttgagcttaaacgtgaaggtatttatgatcactgatcttcatctcaaaggtaggcgagtggaattcttgctggactgtgggggccaaggcgaccctccttttactaatctctatcatcaacggactcttaaccttcagagtaacatgaggaaactttgtgtatcttttcactgactgtatcattgatcctgaaggaggagagtctaaaggaggattctttgtgtgcattttgtttgctaattaaattgtttttgcaagagttacacagtccatgtgtgttgcttgatacatccatatctataagttctttttttttttgcataatttaacttttagggttgcttcctctctcaataagatgcttatttcattgagctggaaacatcaagtttgtaaatgaggaagagctggaggcatctttttgttttgttttaaagcagtgtaacaccatgataaagagctcaggaccagtcagatggcaccaagtttgccatccagcctcaccacttgcaagctgtttgtaagcagcgcattttgatctttgagcctcagttttctcatcagtagaactggactaattctttctccctcataaggtcatcaggattaaaagagaaaatgattaaggagcccagagaccagctattcaatgaatggccagctactcttattacttgtgtaatacatgttgttgaatattttagaaatagaagccccaccaaaggctgtgggcttcagtcatctgcagagccgggtgaagaagtgccattcctccttccttcctggctggtctttggggtgatgtacctgggaatccaataactattggctgattgatttcctatgtatctgaagatgcattttaaagggtcagctgagttatggaggggtctggggtctaagtcttcactaaacaaatattctcactccaatccatcaaatgttagtaccatgtatctaggccacacacacacacacacacacacacacaatcacacatgaaaacacatacatgcacacaagtgtactggttggttgctggattcctggtagggacattataaactgtgctttccatcttttccctacagccaaagctaaagatcacaaggaggtcccttcattcctttctttcttccgtcttttcctccctccctccctttctcccttcttcctccttccttcctatctgtctctctatctatctgtctgtctgtctgtctgtctagatatataaagtgtatcctaggtaggatcggcactgtgaatgagaacagaaatgctttgaaaccattgcatcaacacaatagcaaaatgaaagcagtgatgttctcctagtttccatgttccaaattaaaaaaaaaatatatatatacacacacatacacatatacataccagagactcccctaatttgcatactggtgtatattcaagtgttgatttcaaagcagcctaacacttaagcatgaagtataaaattaatgagttgaacctgtgaccactgcattcaagaagagtcacccaagagagaggtggggagtcgaacagagctcctttactttctcccacagaggaaaaggtggaattctgggctggctttccctcaccagagggtatcccaaatctatgacaaaagaaaaatgccagtctcttttggaaagtagggaatgccctagtgatgctgtatgaagaagcaagcctccatcttccccggggaaatttgaaaccaagatggggtcctgtcaatgaccctctagcatttattgagtgcctattagacaggtggccttgggctttgaaatgcaatatcttatttaacttaattctgagaacactctctgtcttttgatggagaaagcgaggcttatccatggtggtgtgacttgcccaaggccaagctgctggtaggtagcagtgctgggctccgtctgaacggaacctatgtcagtgacatgtaggttgcatgcccttcagactgggactcttggcacgtggcctggaccttctctgcaaacggggtttcctagaacagacatggcggttggagaatcgacagtcatgagacagacacacttgttgtagttgcaaagattctaccatactcactccttggaccctaaagggggagacttgtcctgtgcatttctgagcatgggaattattttgcttcttaaaatgcaattaagtcaaaggcctgggaattagagcagaagccaacatcccatcctctgctggtgggtgaggaatgcttcttcccatgctcaataggcatctcctatattcccagggcacccttgcctttcctgtccctaccccgcatctcattcttctttcaggcatcagtccaaatccgtcttgctccatgaagctgtatttgaacacctatccatgccaaaaagagcgcacaccacgatgccatgtgaggcaaggttgcctttcatctgctctcacccttggggttttgggatccaatcctctccagacttgtcagctagccttctatggagacatcagggaggtgtacctggactttatccctacttatcatttgtgagttattaacccaaaccagatgcaaaggtgtcgacattggttgtgttgtaagaattctgaggggccgggcatggtggctcacacctgtaatcctaacactttgagaggccgaggcgagcagatctgttgaggtcaggagatcgacaccagcctggccaacatgatgaaaccccatctgtactaaaaatacaaaaaaaaattagccaggcatggtggcgggtgcctgtaatcccagctacttgggaggctggggcaggagaattgctcaaacccgggaggcagaggttgcagtgagccaagatcgtgtcactacactccagcctgggtgacagagcaagactctatctcagaaaaaaaaaaaatccaaggaactggctttgctgggccagtttctggtctccagaaccccaaggggactgtatctcttcaagggaataggttgaggggtatctgggcccctcccaggaccttgtcccagggcagctcccagctgcaggttgctctgcctgggaggaggcccaggagtgccatcgcattgctgcactggcctgacctcccactggcccgcacatgaactgttccagagacaatacctagctttctaggggcagcctggaagaacccccgagcagctgggctaaacaggctctgagagggaagcattgctagcaggccatatagcaaggagggcttcgtggaccgtctcctgaagggtatgaggtacttaggcctcagtccttaaatattagttgaatagatgaacaagaagtgaagggcacagtgtttggtggacggaacagcaagaatacaggtgtgacagtaggaactgctgcggcaatctgggaacagcacttgggaaggacattgctgtggggaacctgctagagaggctttgagatttggaactgtttggggtcctggggacataacagtgaacaaaccgattcatatctgggctctcatggagcttccattctggtgggagggaactggaaataaacaaataattcaggcctggggcagtggctcacacctttaatcccagcactttgggaggttgaggtgggaggatcactggagcccaggagttcaagatcagcctgggcagcatagtgagaccccatctctacaaataataaaaaaattagctgggtgtggtggtgcatgcttgtagtccaagctcttcaggaggctgaggtgggaggatcacttgaacccagttcgagcctacagtgaacagtgattgtgccactgcactccagcctaggtgacacggcgagaccctgtctcaaaaacagaaacaaaaacgaaacccaaataattcaaatacattgtatatcagatggtgacatgtgttatggagagaaatgaaacagggtatgaggatacagcagaatgggagtgggggtggctgtaatgtcacaccagtcgggcaggaagcctcactgagaagctggcatctgcgcctggacttggcggtggataccaggatgagagcactccaggctaagggaagggcaagtgcagagcctctgagacaggactgtgctaggtctgtctaaggagcagcagtgtggctggagtaaaaaagggatggagagagttaaactagcagagcccatggggagcgggcttcctatctcctctctcactgcactctgggcagcaccaccaggctctgcagatctttgctgagtgtctgctatgtgccaggcacctggacctgacccctgtgattcgtgctgctctagagagacacggaagtatatgcgccatttcaaccgtgcccacgaagactaggaagggagagaactgagggctgtggggacacctcctcacctgggtagtcagtggtgtcctctgggaggactcagggtgagaagaagtcagcagagaacaaggtagggaagagttccaggcagagggaatggcctatgcaaaggccctaaggttggaaagatcttggtggcgcgatctttctttgcatggggaaggggacatctagttggggctgccctctctgctgtgagcgcctgttgaggggtaattcctgtgggagggcatccatgggccactgtggtcttctctgcctgatgccctctcctgccgtccaaagtcaatatcttccttccaagtggcccttccctcttgccctccttctattcttcttcctaggcaaatatctactagacatttactctgtaccaggccctcagagaagtgagaagataaagttagctacaaagacaaaaatgatcaagctgtctcacagggtagttcctgttggggttcacaagggagtctgtgatgcctggctcccctctgcttcccggtcggctacccccagctttagggggtatccgttcacagttatttttgtatggcagcattgggttagacttggttgtgcttcacgcagtctaaagggtgggagggtccatcatgagtgtcacaacagtattttgggttcctctttcctacgcatggctgcagtggtgttccgtattccctccatccttttccatccatgaccaggaaatctccacaaagcagggtccctgcccccaaggggatttgtactttacttaggacctgaccctttgaggaggttcttactccccatccccaactcttcatcacaaagacctatccctttcgagagagggacaggttggcaggaaaaccagatccttgttggtatcgcctgtaggatcacatgggatgttttgatttgatgttgaacttgaaagtacatctcatgcctggccttccgattcgttacttaaattattacaatgttaactttttaattttattcttattatgttttttggtggaaaatgaaatatgtcctggctgtttggatactgaactttttttttctcattattaggttttaaatggttaagtaaatttcattaaataactgtaaacattccaaagagtcctgcatacatatcgtatttcacatcatcgtaacttagatgcaaaatattaaaatgtaaatgactcaatagaaaaattatggaaacaaatgtatgacttttattacacttttggaaaagttgcttaaatatttctccttccttcgcaaaaatctatgatgagttaaaggaaaaaaatattttaagacactataaaaaacaattcttaagaataaagcaacagaccttgtggaacagctttttttttctaattttatctgttcaactctgtgaatatatgttggcaattgtccactcattaatttgattattttaaagtaagctatataaacatgaatataattattgtaaatttaaaacattagttagaacaatattgttcccaagtacataatagatagaggtctaaattttggtatcatgcattatgaaatttgaaccaacagttctttttcctccgaggaaatattgcagtctgtagtaagaattgtctgggaaacatttggtattttattttagtctctatcacaaatttccatgtgattgttctatattaatcatgaaaactgacacgagattccttttccataataaatagcaagtaatgtaataaaaacaaatgataacgctaatgaaaaaattatatttttccccaacttagagaagagttccaacaataggtaggataaaataaaatcaatattttgacagtgctagtgctgtattacgtctggctcattaatttggagacaacttctctgttcaatcccaaatcacaaagtgtcaacaaatagtagttttaacatctactctcattccaatgcatttaatgctttgcaagttatttttagcagaaaatgatttttttgattctgcagatgtatagagattgcattgtgtaggtttttgtcttggggaacaatgaaaaacttttgccattgcaatttgtattcaagagatagttcattataaattccagttcagcacaatcctatatactttttcctatatatatttacatatatgaatatgtgtgtgtatacactcttaaaggccatgttcattcctgttcattaattttatgcaaagttttccttagcttcgtcttcttttagaagaatctacagtttctgatttccaagtaccgattgtcagttgattaaggtcaatgctagcacttattcaggctcttattgactggggccacgtgatagatgtgattgatcggctttagacacaggattgctcatttcccattgtaacactcctttccacctgacccatccctcattaccccgagttcttcatagagtctttaagaacgatccacccccccacccctcaggtgctgtgctgttacattaaggccaaattccatctctcacttgtgcaaaaatatatgggtatcactgctgcctgtcttcctttgttttccagggatcacaaaagcctgggatttagaatagcagataataacatacagtgcatattattgatgctgctttaattgtcttattgacaactcacttgaacttggagaagcatgctaatatttatcatcctgtgaactcatgtgcattttctctactcaagccataattacagaagaatttcgaaactcagatgtctgcctgctgcactgcctcaccttccctgtgtttggacaaaggcttccagaccactgcattgccagctgtctttgctccttgcccctgaagcttttagcaccctctggatgcttctccctctaggggagatctggctaattaacactttgaccagcgtctggccaggatcggggtggcgatgtgacccacctgaggagttgcaaggagggcagcatttgggttgcctagtggttttttgttttttccaagagacagctgtttcttacctttaggaaatgccaatggaacacattagaaagatttagaacaggctgaagctagaattgaggccactgtcctggctaggagacaaaagtccacttaaggagggtttgacaggcttaagtcaatggatggagccatcaccatctaactcatgtctacctagctgtccccatctgccacccatgccaccccatccaccaggcttcagcctcactggtctcctttcaggtcctcggacacacaggctccatcccacttgagggccatagcacacctgtttcctctgcatgggaccccctcatcctcaccttttacctggctgccccagcacaatgctcaggtcccactcaagtggcacatcttcagggaggccattcctgtcctcttctatcctatcccagtcacctgctgtcttgtccttttctgttgtctgcacagtgcttatcttcattgactttattgattgtttgcacacttacccatctccttccctccacaggactagactccccaaagccagggcccctaacagtctcctgaggtctctactcccagcacccagagcagcgacttgcaaatggcagtccattaataaatatgttttgtaagaatgttactttcctaaaagaaaatataaatttaggagtgtgtccttgaccctttgagaacaatgacatgtcatgaaacagactgtcccatgacgcatcctttgttccattgttagagatggaagtcacagctgtgactctctcccagcccaccacgaggtcgccgtgatggaagtgcagaaagaaggttgtctctctattgaaaatatattagcgttattgccaagttgttctccctttgtaggggcactggcttaatcaagggcgcatgttatgatagggacaggcttaatcaagggtgtttattctggcttgggttttggcctcgggggccttttctctgaaggtatttccccgcctataccacttggtctgaggttggccacgcagtccctgctgcaggcctcttgcttgacatcagtacgttgggcacggagcgttggagtcaggttctttgtcgctgctgagagccagctgtgtggagccctgattaacacagataaagttgttagtcgctctgtgttcttgtctttggcagtgcttgatgtgggtccctgggcagaggcgtcgtggagacgagagaagatgctgccccggccccctgattggtgagccgctcatctgactgatgagtgaggtggagtaaccccactggcttcaacgagacactcgaatcacagaggatgattgcagaagggggaaaggactttaaacctatgtcacaccctgttgccccagtgactcctgtcttggggagcttacgatgcttgtgcaactgaagaatctgttttctgagagtgttgggattgtattgctcgcgtatttctccccacaagtcaacaacaaacgagaattcttgcagaaaaataaaagacggtaggaatcagagagggaaagaagtctcgattttctcccgtctgtctcatagaatccttctgcggcatcaaatgttttccttttatccatattatttctttactagttaaatagaaatatcctttccctgtgcacatatttcctctcaagtagactgcaagcttcctgggagcagaattgttctttttcttcccatagtgtgccactgccttgccagctacacactgcccccgtccccaccccacaagaggtctggcactcgagggtgggcggtttgggatgcgtgaggaaagtaataaaaccttaatgagtaacagaagtgaatgaagagtgtgggtctttggaaaatatttagaatgatctcctgttgaattgttcatcatttatagacctcttgggctaaaaactatttgctgtctagcggtagccaaggctagcttttttctttttcaattcaatgagtaaaaaagtcgactcattattattatattttttaaataaggaccctaagagtctaccagggatatttgaagacactattattcaaagccagacattttgggagtgaaattctcatcatgaatgggttccttgatgtagaaactaagaaatcccttggcgttgtgattcttggtgatgacctattgttacttgcttccaattaaggaagggagtcccacgtcccctgggttcttccagctttccgctggggtttgggcattgcctcactggtgtctgcctcccaacctctcttccccagtgtgttcaagtctccagcttcctgttccactatgacttcagctgtttgatggtgtgaatgaaaataagatatgtattcaagggcacccccggtgtgcccccattgtaggccaggtgacagttcatagtcaaacacagggtggaggcagaaatcccaggtcctggcctttgcttggtgattcacttgggtactttattacctacatgggatctgtttccccgtctgtaacacaggggaggtgtgcaagagaccaagagcaggttgaagaatcattagggatgcttgtcaggcatgccggttcctgagctccacctggagaggcagctttgcagggggtgctgttgtccatggactccacactggtccaggtaacccttcccagttcttctctgatgggttacacctcgaacctggagacatggttaaacatccacagctgggcgtggtggatcaagcctgtaatcccagcactttgggaagtgggaagatggattgagcctaggagtggagccaggagttcaaggccagcctgggcaacatcgcaagagcccgtctctacagaaaattaaaaaaaattagctggtgtggtggtatacacctttagtcccagctacttgggagactgaggtgagaggatggcttgaactcaggaggttgaggctgtagtgagctgtgatcaagacactgcactccagtctgcgtgacagagtgagatgctgtctcactgtcacttacagaaaattataagtaaataaacattagcaaaccttatttattgcctccttggttttctccagattgtctcaattagtgacatttaaccaaatcagagagtatttcacgccacaatcacagaggcaattctagacccttatctcctgagaccctgtcaccttacggtgcagacagcggcatcaggaagtgaaccgacctggccctgttcacaaaagagccacatgtacagcgtccactgaatctctgcattcgaattcaaaccaatagaaaatagcagaagacaacaaggaaatgactgattggtcaaaagccttgtctgtgattttaagaacttgtagctttgaagatttctttttctttctttctttctttttcttttctttctttttttttttttttgcgacagagtctttctctgtcaaccaggctggagtgctgtggcataatcttggctcaccgcaacctctgcctcctgggctcctgggtccaagtgattctcatgcctcagcctcccaaggtgctgggattacagacacctgccaccatgccctgctaatttttttttttttttttttgtagttttagtagagatggagtttcactgtgttggccaggctcgtctcgcacttctggcctcaagtaatctacccacccgcacctcccaaattgctgagattgcaggggtgagccactgtgcccaaccagaatcttcagatttctatctggtgaagttggggagatgttcttgaaaggtatagctgcagtgagcatgtgtgattggaaagagacttctaaccttttatcttatgaactgcccatcccatatgagttagaaattctctcataactccctaatggaaccagtgggacaacatgttattagtactgttccaggtatgtctggcttttgaccttggccagcagtggttctgaggaatgattatttctgatgcctactagatttcatcttttaacaaggaagacccttgagtatgtctactccttccttttgtctttttagcacccctcccccagaagttgggtgacattttaaggaggaaggacaagtcactactgtgtgcagatttcatatcagatacaagaactccacttgctgccaaacgggggtttaacctctcccagatccttggttgtgcataattaatgcgtcgttcagcatttgacttttgtgcctttcatacagatttgatcttaaaggatgcctgtggagaagttctgtgctcacaaaagcaccttccatgtatttcatggcttttgcttttgagttttggggagaccctttcttgagttttcctaaagaaggtgatctgtatggatacaatacacaatctctcttaaattattcagcaactatttatccagtgcctagcactgtgtttccaaatggttggaaatgaatggctgcaatatagttactattactaacactaatgttagtattagtcttagtattataatataaacaggaaaagaaggagaaggaggagaaggaggagggggagggggacaaggaggagggggaggaggaggaggatattttaacacgcccttgtggcatgagttctataggtaacttcccttgcattgtttttttactgaatcttcagcagtcctgtgagatggggtcatcagtttgattttccaaacaaaatatctggggctcagagcaccaaatgacttaccaaaaaacacatgcaaaaaggatcacttgagcctgggagttcgaggcttcagtgagccctgactgcaccccaccttgggtgatggagcgagaccctgtcccaaaacaaaaacaaaacaaagcaaaaccaaaaacccacattcagagcaagtggctgagttcaggtggaaaccccccaccctgcctcatcgaacctctctttgccactgtgctgtgttgctgtggccaagctattgcctttttggggaatggaggtggaaggctgaagggaccattcatgaagtcaccaggctctagtgggaaagtgtctagccaagagatagctgcaaacctagttcccatttatgcccactgttgagaatgcttggggacatcctttaaatggtttctctctgggcaaaggcagcactccctgaatctgccctcttgccaagtagaggagatgtaagaacatgttttctattgatttttaaaagcaattcaggacccaactggtaataatcggtgtgacctgtgctgttctccaggcagtcacaagcagctcggagccttgttgtgtgactctgatgtttgggatgtgcattctttgaagattacttctaaagcaaggagtccaaatccttaattcacgattctgtctattcctgtggtgtttacattccaccatggcagaagatcactgtgaaaaagaaagatgaaaatgcacttttaagaagggcttttcttgtgcgggcctcctccaaagaccctaaccctttcccctcttgttgacgccgaggtctgtgtttcatctacagggaacatatacattaataggtgatttaaagctttgtcacactgtggtgacacatgcaggctgagctcttggggcaatgagctgcgtggagcaagtgctggtgtgatttcgggtgttggggcaggtctctctggcatcgtgtgtctgtcaaagggctgtctgcccttttgctgaagtcgggtctgcaagggtcttggggaaagtggctggtgaggctgattgatttgaccagtgagcagagcaggaccttgctagggctgggcactaagagagagatgagtcttctacttagagaagtcgctgagctttggaatctgagagctgagtaatgtgcagacacagggtctgggaagaccccttgattccctaaacactaagacaactacgattcctcttctgtctataccactccccccatatgattcaaaaggcaccataaaggcataacatatacaaggaccaagttagttctgatttttccaatgatgactgttttgatgcctgttgggttttttttttttttgagggggacagatatcaagtgtcaaatactttaaaaatagaattcctttttttaaaaagtggtattattgcttcctcatttttgaggagtttccaaagcacatatggtctgtccatgatgttacacggggtttaggtttaagatctcggtgaacttgatacccatgacccggtctacaaagaacatgtggggtctgtctgcttccctctatccctgcagtcagcaacaccaaggatactcaagactccctatcatcggtggggaataagccaccaggccacctgatcacagagcactccctggatgcacttgagtgtctgggttccagataggcgtggttctacataagactgtgtgtctacattttctggggccaacgagaaaccatttctgatgctatttgggccacccatctagtagattaatgtggacaatgatgaaatgatggttcacaggtggaacctgagatgcactctcaattcccatatggatggttggtgtgggtgcaaatggccttaggaaaagagccaggcttttgcattggtcagagcactgactttttctataatgtgttgaagggggagcaggaactcactagtgttcctgctgatggttcccagggccctttaaaaacagcctccttaatatgttgctgcctgttcaaggcatcgtgtggccttgaaatttaaaaacatcatatagtaaattcgtctacttctttaaaaaattttacttccataagtttttgggaacaggtggtgtttggttacatgagtaagttgtttagtggtgatttgtgagattttggtgcgcccatctcctgagcagtacacactgcacacaatttgtagtcttttattcctcactcacttcctaccctttccccctgagtccccaaggtccattgtgccattcttatgcctttgcatcctcatagcttagctcccacttatgagtgagaacatacaatgtttggttttccattcctgagttacttcacttagactaatagtcttcaatcccatccaggttgctgtgaatgccatttattcattcctttttgtggctgagtagtattccattgcacatatatatatatagaaaagagcttttgcacagcaaaaaggtcagcaaagtaaacagacaacccacagagtgggagaaaatcctcacaatctatacatctgacaaaggactaatatccagaatctacaatgaactcaaacaaattagcaagagaaaaacaaacaatcccaacaaaaagtggcctaaggacatgaatagatgattctcaaaagaagatatacaaatagctaacaaacttatgaaaaaatgctcaacatcactaatgattagggaaatgcaaatcaaaaccgcaatgcaataccaccctactcctgcaagaatgaccataataaaaaaacttccactttaaaaaatatcttctattctccatagggaatactccctggaattcttgttggccctggctggctgtggctggggaccgcactcctagtctccccagggggatctggtgcctccgggggagctggagaagcctctggaggttggaaggccagggtgcataccctgggatgaggcaggaggatttaccctccatctacctcaggtcaacagcattcctgtgatgcgaatggaccctgggtcttttactgtgttttctgcccacctgtatgccatagcccgagagacacctgcctaccatttttttgagtgagtggatatgaccactagacatctgtgcctgcggccatcagcaatccagcataaagttaccccctaaaatgggaatctttgcctgcctaatggagtggcgaaggtgctgagctgggttggagaccaagattagatccactgtctaattctcagtagattgattctccattagatcccagatagatgagcttggtagttctaaagcattttttgtacctatgtaggaatggcagaagggacggattccccactgtaggaatatttaggacatatcttgttattttaaaaagtggctgtgattctcataaaacaaattccattttaactccatttattttgtagggctttaaagaaggtagagaatgtttcgaaatgctgatgatgatggtgatggtgatggtgatgagcagtagcgaggtgaaaagatttggaatcagtttctgaagtgggcacccacaatgctcattccagttggaaccatcaccctttaggcaaatctttaccccttggaagctctcagattatcagcctcctaaccgcagggagaccctcctagtcaaatgtggagagggatcctagctggtgtttccagagggcagtgtgaatgataaatactgttcatattcagaaggaaaaattgattttaaaaatgtgcctttgattcactaatctctgacattgagacattttttgaagtctgttgctataattagaattctataagccatttcatgtctctatcaaaattttaagagacatagaaaatttaaggttttttttggcttacaattcatcatatcaatgcgaatcttattgcagtttgggcttcagtgtggagcagtatttcggggccagagacacgcgttctgtcatcagggctgtgttgagagcagcccctgtgctgcccaacaacgcacagcttgaattttaagaattgcttgtgaattgtgtttctgccttgttttgatttgtttttcccagccaaaatgtggggctggaggcaggagactgtgtcattcagaatctgtgcctgcttccccacccatgggctgtatctgtgtgtgccccggctgggcgggtggacgggaggagtcgcgggggaggcttggttcctggggacatgtggggtggcgccgacagctccagccgggctcaggtgagtcacggctgcgctttgagatgggtaattggtggcatgtggtccgtgagccatgtgtgagagcccttccttagtcataggaaagggaacaagcgtcgcaaataaaagcctcatcagattagtgagtcagaaaagacgctaatcccaacccgatgcttcatttctactttttttttccccttccaaaagcagaagctgttcctgttctttaagaaaaaaaaattaaaatcagttttctaaaagactgatttaaccacaatcaaaagtggaggggggtgtgggccgtgtcactattgctgtatgacgattagcatgaagatgagttgcactttagccgggctgaaacttgttcctaacagaatgttaaatacttagtgaaaagaaagattatgtctatctagttacaccattccttgatatatgctccatgtcagaatgccattgtctcctgggtaaagacggagagttcaaatacccactatctctcccctggtgctccgaatgctcttctttgaagtttttataatccatctgtcatcttctagcaaggagggcacatgttctgtaccactcaattacagaattctcctttgccagctccaatgagacaggaaagaatgttatgggtggttgagagaaactgtcagatatactaaattcctaggattcatacgcacggtgtttttccagggtaggaacacagcccgccttattgttcaagtgcattagagatacagttggcattggggtagagaacctttgattttttttttttttttaaagtctcttccagagagttgtcttaaatttgattgttctctttttgaaaaaaaaaaaaaaaatcatccaaacctcctctggaatgtggacccgccaatgtgaactgaaaatgtgacatttgttttagctaactaggagtcggtagtccaactgtgcagagattgggaagtagcaaagtgcttttgtttgtgtggtttcactttagtgaaataggatttttacttggtcttgatagaagatggtgactagataaagcctgatccccacagaaataattttcatcatcagctgagccgaaagcctgaaccttaaatgttctgccatctggtgagatctgagaaagttagcactggacttaaaagtctttaaaatgggttattttatttaaggacaatctaccttggagtggttagtgtttctagatatcatgttaacttctcactcattgagtcacgggtggttaaattcgttgtcttatgtgaaatgagtttgatgatctcggcttagcctctagtgggtattaattcacattatgaaatatcccagaataatttagcaccgtgtggcataatttgcatttttactcaagataggggcaatgatagtgtctctggatctattccccccctttttttcattcaaaagaggatggctctcgtttgtggctttcagggtgattgtcggtggggtttactcttactaattcggtgggaacatatggctttagagcttggggtggtgagaagaggaaattttagcttgggcgctaaaacctgacaaggaatatttgcggggagatagttgcagctgatgagctaggatttcatgaccctgcgagagtggacatctcctacatgcatgtacattttacacagaagcacatacatgagactaaagaacacgggttcgggtggatgcattaggtttgggggtccacaagtgtccctcaatttgtaaaaggcgtcttttctctttacaaaacaggaaggttttccagaaatgcaggatacgattacagtaattaatttagtgaaacttcttaaatctgatcttctgttcaaactaataatgccaggatggggtggctcaatgttgttaattgaaatctggagacaataaaaaaaatgtctttctgcaacttcaatacagcagtctggaactgtcgggtcaggctgtgaaccaattttcttctcattacttttgattttggagtcaatacaaatttcatcagtgattgtagggtgcaggtcttcgtctgcatagaccccgtcatgggagaatatgtgcgcttggtttaaagatttatggaaaagtggtgctagtgactcaggaaagagaggaaggaaatgctgaagccaacagcctccttggaaactgctgcagtgctcaggggtgattagcatggagaggcattgggctggggggagagtgctggaccccaggaggcctctgcatctgcagaccactgggggcagctggcggcagcctctgtggctcccttgctgttccttccagacctgtgtctttagcccaagtttctctctccttttttctttctctctcccacgtcccctatatttacagctgtggagagagtccttctgcagctcacagaatttaaggccccacagaaacttaagggtagaaaaaaggaaaaaagaggagactcaactttgtaggagtttgtgaaattctgaaagcatcctgggcaaagaggtcttttgtgttgaaacatagatccaagacgtcgtatgcgattcctcatttttcctgcgtgcagtttgcatctgtgtaagtcatgggatcagcccatctatcattaggtattggcctaattggacattttttacgagcccggtttgctatttatgttaaaagcaattcgcagaaatgccctttcttcatgattcggtattggcaatagcgacgtatgtttaatcacattttccatgagtaattatctaatttacatgattaccaatataaaacaggaaaatagaataggggcttaactcagtcctgcttgggcggtgacacaggcgtccagaaagacccgagtgagggcgaatggttgctggttctgtttccttctgtcatatcatggagatttttattagcaacaggagctctctgaagccgggcctctggaggagagaggctatttgggattctgttgtaatgcagtttgaggttcactctgtctgcttgggttcttaacgtttggggctgtcctttttgaagacttccgggagatggaggtcacattttttattcatgttgaaaaatattcatttatcagtattggtgcaactgtaaacaagtgataaagtgacaacatttacaacagtaaaactgacagcatttactttaattttctgtcattttggtaattatatcaatcaagatccaaaactaaaatgatattttagcatgcagtaagaaatgaggaattcagatcttaaaagaccattacaattagctttgaaatgttcgccattttaccataattgtttcatatagcttatatgtcttcatttacagccgaatattctgttgatcttttataaacaaagtagcacccatctgctccttgagacactcctggcgcctattcattgcaaaaataatacatgtcctaatgacttccacatattttgaaatctcccttttgaaattggtcttggcagattatttgcaggtacttgagttgcatctgtttgcaattttgcaaatgcggaagactttaatgttgagcactgcaagagggctattttaatcctcagataacattggctgtcatcaaaagccacatttatcttttcgaaggtggggcaaatgtttaatgttaaaagacagtaaaaggtcaaggccaagtctggggtctgaatattttcctttcacgtgctgtgccttttgcaaactcttccttgcatttctttttatttaagttttagcttaataaccattgccaagaggatgttttgctgataaaatgaaagatcaggaagagagtaaatcagaaataatagtgaactccaggatcctgagctcattactaccatgtggctagcagctgaccagctttaggttgactctgtttacagggaagaactaaacagcacagtgttggagaatactggggccttgaatgctgttgctggcctgcctcccaggaggggctgaagatctgggagggaaggtggtcactgtaaggccagcgtaccttcagcaagctgatgctgctcctgggcggacccattgcaactggaggagctgctcactctaagagtctgcatggggacttgtttcctctttgttcaaactctgaagcccagaacactgaagttaagtgaaggtactttctggattgctgtctttgacctggtcaacattgagtacacaagcaagccatcctgtcactagggtttttggactctgcagaactagggcagcaggacaggttgttaccagcctccttcctagtgtctcctctttggtcctcatgggggtctgtgtgtgccatgtggagctacagtttgttctccactggctgccattttggccatcacccttacatctgagaataagatgttagcccattttgtgtttaaatggaagtagttggccatggagacgtcattggtggctgcaaatatgctaaccatgaaggtgtcgcctacacaacctacaaaaccaattcacctccaagccacttccaatgactctggtgacagaagggacactaaagctgaaactagccccatcctcttgttaaacgtgagaaaagtaggagcttcacagataaccaggtacagcccagcatcttgaggtttaacttaagaaaggcatgctctaatcctggggtgtttctggatatttttctggcaaaaattgttcaatatgtagttgtataatgcgtagttgtttcctgtttcatagatagttgaacatgcctctggcatagaaacggaaagtacattaactgtgttatggaagagtgctttatcaccaccactcctcatcagcgagcaccttggtcatctcaacccattggtaccatttgatagatgaatgctttacaaatgtgtatgtttgtgtgattagttctttagtacataagtcatatgtagtcatcaaaaatttttattttttaaatatttatttatttatttatttatttatttatttaatttttgagacagagtcttgctttgtcacccaggctggagtgcagtggcatgatctccgttcactgcaacctctgcctcctaggttcaagcgattctcctgcctcagcctcccgagtagctgggattacaggtgtgcaccaccacgcctggctaatttttatatttttaatagagatggggtttctccatgttggccaggctggtctggaactccttacctcaagtgatctgcctgccttggcctcccaaagtgctgagattacaggcatgagccactgtgaccggccaaaattttttatttttttattattgcattcaaataagtatagcattaaaaatataacaaatttctgaggttaaacctaagagaagcctgtagcaactcaacccccgctttttcattttgtttgcagttgcgggtggggagaaggtagcgattttgcacagaatgggaactggcatccaaggtttttgctttttctgcgtcatttatattctgatgctttcatatatgggtgattacactttaaagagaaaagacctcacactcttctgatgatcaaaaatttcacactaccaaagggatacatcagggagcagggatggttaccatctttcccttacagaaaaagaatgcagcagcgggtcctgagatgaactaggactgtggtcctggcgcaacagcatgggcgtcaccagggagcttgttagaaatgcaaatcccgggcctcaccccagacccatctaatcggaaacgctgtgggttaggcccagcagtccatgttttaacaagtcctctaggtgactctgatgcgtactgaggtgtaagagccactgcttcaggggttataaaatggcagtggcttttccaaggctagaagcccaatccccatgttccagaactttccatcatctcctagtgtcatcttcgtgtcccagaggctgtgctacaagcctgtagacccagtcagtaagcacggttgtttgtttaaaatgcgaaaaaacagataggtggttatcgggtgcttctttttttttctgagacagagtcttgctctgtcacccaggctggagtgcagtggtgcgatcttggctcactgcaacctccacctcctgggttcagcaattctcttgcctcaggctcctctatatctgggattacaggcaccaccaccatgcccagctaatttttttttttttttttttgcatttttagtagagacgatgtttcaccatctttgccaggctggtcttgaactcctgacctcaagtgatccacctgccttggcctcccaaagtgctgggattacaggcgtgagccaccatgcccagctattggatgcttctttcttctgcctttctaagagatcatttattggggtttttcacaagtttaccagttgatcattagaatcttgaaaaatgtagaggtgactccgatgtctaaaatgtgtttattttagacttgaattctggagaatgccatctctccgtactgcaacaggtcagtgtaaagtgtctgttctttgacttttgagtcctgcatcctgcagggcattaggtgtttccatgttcaggttggggaacatcacagcagttgttcctgtccaggaaatatctgcattttatggagtcattagagttgtctgtttagagtttgctgggcaggataagaggattctcctactcattgcagagcttctgctggagtgtttttgggcagaagccacagctgtgtgactatagtgagatgctgcgaggaaggttggtggtccaagcccaaggccaacctccgttgcatgtcggccattggcaattctcaggtagagctttcttggcagtgagagagactcttggtgagttcaggatggagtcagaaggaaattcattggccacttgctgtgctgccactgagagtccttctctaggttgggaagtgacaggctgatggccttctgttaagaagttatgacccaggcaccagccatggccaccatacttggtagagtctagcgaacctgcaaaggcttcagcccccggagcaggagaagcaggtacaagcaaatgtgtgggcatggccttcatacccccaagcccagtcctgctcctagaaataaggagacaaagaccttcatgcttcagaccccctggcccatcccattgactccacagcctcagcttcagctactgagctctccacaaatgtggctcccactatgtgagactattttgcatgatacatagattattggatatctaaagacctattagaaaaatataactagcggccgggcgcggtggctcacgcctgtaatcccagcactttgggaggccgaggcgggcggatcacgaggtcaggagatcgagaccatcctggctaaaatggtgaaaccccgtctctactaaaaatacaaaaaattagccgggcgtagtggcgggcgcctgtagtcccagctacttgggaggctgaggcaggagaatggcgtgaacccgggaggcggagcttgcagtgagccgagatcccgccactgcactccagcctgggcgacagagcgagactccgtctcaaaaaaaaaaaaaaaaaaaaaaaaagaaaaatataactagcacattatagctgtgagttttgcagatgctattgcttaaggtgaggctaacttataaaaagaagaaagaaaagagtaggtgcggtggctcatgcctgtaggtgctatggctcagctctttgggaggctgaggtcagaggatagcttgagccctggagtttgagaccaatctgggcaatgtaacaagactctgtctctcaaaacatttaaaaattaaccaggtgtggtggtgcatgcctgtagtcccagctactcaggaggctaaggtgggagggtcatttgagcccaagagttcaaagctccagtgagctatgatcgcaccactgcactccagcctgggcaacggagtgggaccttgtccaaaaaaaaaaaaaaaaaaaagaaaaagaaaagtgagttgatttaaagttaattaaaaaaaagtattaagtaaataaaggtctggatggcacaaagttatggtgggaactgtgaaagggggctgtggatgactgaggtgtggaatgggctgagggtggccagtgtttcctgaacctccttggccatcccctggggagggctcctgcacccagcagaagtgtggctggtccatcctggtgagtgttttattgagaggagtcccaccccctcttcacatctcaggctgctggtgggtgcacttctgcgtctcattggcaatgcaattactggcaccatgggaggtctgcaggttcaaagctagtgatgagaaatctagttcaccgctttcagaaatacgggtttggtttaggtggcgatggtggtgcttcatcaaagaaaaactccaccaacccataaaagacaaataagaacacagagtctggtgctcctctgttagcaggagactccaggtgagaggctgagcctgcctggctggtctcctcattgtcctctcttcctccttttccatggcggctgcccaggacataggtcctccaggtgcaggtgggaagggacagtcatggagctgtaccactgagtttccctgaggcatccacatgacaagtgcttgtaccttgtaactctgggctgatgcacgggtcaaagcatggggcttgtgctgactcagaggccatcttccttggtgcctgatggcagtctttgctcctgtatttcaaggctgcgggttttggggactgacagatgggcagcaaggcagtcctgtgcttcctgaagtcagttatgccactgcctctgcgtgtgctgccccaggaagggagggctcatccgtggttggaggcttggagatgcaatgtggacttgtcttgctggtgttcgtggaatgctatggcatccttgggtggccaggtggtcagagggacctgggtggctggtggaaagtgaggggcaacagtgtcgcctccctgcaatggtggggacatagggggacctcaccctcagggaggtactgcctgactctgcgatgcccacactgcctccttgtttgtgtcccagtggcagatgggggctggtttcctcaatatttgggactttctgaggacgcctccaaggaggatgagatataatttctgccctcgtggaatttgcaacatgaatggagagccaaggccaaccctcttgggaatgacctgtgtaaggcaggggtgctagagcaccaagcccgtcaggtgtgggtgctcagggacaggaagttcagggtgatagagaactccgcagcgtggacaggcatgagggaggatgtcctggtgtcccctaggtgagcaaaggcagtgagccccgagaaggaggtgggaggagggctgcttggtgggagcagcatggtgcagctcctctgtgagaccccagaatgcagcacagcgcatagcaaacagtacatgctcaataaatatttgttaaactgaactgaatgggactagagcttcggttgcttatgtggatgccagggctggtctctagcataatgattttggaaagcatttactgggtccctgccctgtcttggattctggaacccggagcccctacagaagccacactgcagtgccatcacccgtggagctggcagcagaacccactgggaccagattccctggcatctcccagggaccatccccccgaccagctccttttattaactcagtgttgaaggagctgcccattgctgaggaaggatggaaatgaaagataacggagtgtgtgcgtgtctgtgaaggtgacgatataaaggtaatgccactatgaaaggtgatctcattcgcaactcggcgactccaatcttctgtgcgttttggccttttctgaatcgctgccccactcagccccaagtcaaaaatttgtttacactaatcagattttcagctactcattctgttgcaagaagaagttaagttgtgtgtgtgcacgcgtgtgtgtatttcatacatttatgggttaaaatcagaccccgcgtttccattgttttctatctctaggttaaaagcttttccctgaatctctcctgatgcatctctctagaaagaaactcccagactgggctaggctgaaatttaaacacacacacacacatacacacacacacacacacacaccctacacacacgcatttcagactacactgaaaaactgcaagagaaaataagaaatccagcaacaggaaaggaactttcagttttcacttccaagtttggcagcctggtgaacttgaaaggttagctatgaataagcataatcagatctttctttttgtccatatttaattcaaatgagacagctctgtgttgacttctaatacagaaaggccacccaccatggtggcgctcccagccaatgaagccggctggtgaaagctttcttaaatggtgctaatcagcccggagaggcctgccctctatccccatcagtattctataattcagatgtgctgataacctgaaattgaatgtgtcaggatgcagacatgtgaagggaagagggaactccaggctagaggagccgggtagctgggagacaatgctgtgggggagggggtttcacaccctcccctgatccccccaggcccccgccccccgcagttgtgcctctgtgtgtgtgtgtgtgtgtgtgtgtatgtgtgtgtattcgtgtgcacgcatgtgtgtgtgttattgttcagggccagagacaaaatggaaggtttcaagttctgaaatatttataggaaagctttggattttgtatatgttaaatgaatcaacagacattttggctgctaaggggtgaatggtaatttgcgattaatttttttttgaagccaaggctattttaaaacctttctcccactttctcatataagagacagacagacacacacacacccaccccagtctggtgagcacgtctcacagggaagtttaacaaaagagtcgctattgtcactgtcccagccggcagcagtgcagctgagggtcagttgctatttctattttaaaccttgatttttgcaaagtttgtcttttgactgttctcattctaatcaggcttagttaggggatccgctccaagctccacaccaggctgtgaggacagagaaagataaaccggggggattaaacaaaaagttctgctctgtcaatagtcgtgtgtgtgtgtgtgtgtgtgtgtgtgtgtgtgtgtgagagagagagagagaaagagagattcattgaccaacactcatctcgcagccatttctttaatttcaaagaaagtgcagtttgtcacagagctctgccttctgtgagctggtgcctttgactttgcatgtgatttgttgggtgtgccttcagggtgctggctcttcagtctcccccttgtgccccatgactttatgtccctagaagacaggggaacagcagctccagccccagtcgtgtcttcagtacctcagtctagcccaaacatttcccaaatgctcgggtgcaatcctctgccagcctctgctgctgccaggagcccagccctcttcaactttgctggttgatgtcttgatcagcttagaagccgcctgatttctgcatcttcccccatgtgctcttccaacctcccgctcctgcaggtcaggagggacctttccttctgcaggtctcccttcatcagagcatgtgtcattccatcctggtttagagacatctgcatgcctcttgtgtgtcctactgtgtgatgtgctccttaagcgctgagtgtgtctgaggcgccttgtccaccccgcatctccctctgcacagaaatgggcaggaactggggagacgcactcagaaaggggctgaattgcctgtggtccctgctcagggctcgccatattcagaggaaaggatagcgaggggagacaggctaggactaggcaggatagtggagatatagaagctgccttttttcgtcatggttccagctggtatcaccttgtcatctcccactcagtccaggctggccttagggacacgggtctgccctcccaatcaagtgggcactcttttcttcagagctcctagattttcttcctaagagactgctctgtcaaagggtaagaagaaggtcccaggtttttgtttctcttttcttttttttttctttttttgagagacagggccttgatctgtcatccaggctggagtgcaatggtgtgatcacggctcactgcagccacaacctcctgggctcatgagatcctcctgcttcagcctcccaaggagctagaactacaggcacataccaacatggctggctaaatatttttagagacagggtcttgctctgttgcccaggctggagtgcagaggcacaatcacagctcactgcagccttgaattcctgggctcaagcaatcctcccatctcagcctcctgagtagctgagactacagccacgagccaccatgcctggctaatttttaattttttttgtagagagggggtctcactttgttgcccaggttggtctcaaactcctgggctccagtgattctcctgcatcagcctcccaaggtgctgggattataggcatgagtcaccacctggccaaggtaacttctcatctccatccccatcacggtcagactgattggcaccatgtggcctgtcatccagaaagaccaagaattcttccctgtggtttggacccagtggtggcttccccaagggaacggttggcatatgtttaattattcattggtgttctcgtctgtatctctctcctccttgattgttttgtctttccctaaaaatatttatttgaaattctgtgatcaaagactgaaaaacaaaatagagcaggatattaaaaagaaaatttttttaaggaggttggaatgtcaagatcatttttattagaaaagtttacaagatgaagccacgaattatttacgtaaacttcatatatcaagcataatactcccaactgtgcctttggtgagtgatattggctggcagaacttggatttaaaataccttctacttaaggcaggaagaatgcattttaattaaaattaacggattttttttcttgatcatattttaacacacacacacgcactcacacacatctgtgttcagaattgataaagaaggaactctggttaaataatccacttttgtctgacaacggaatccgttatagaggtgcaaatatgcagaaagctatttggaaatgcatcctagtagttgtcaggttttattatgcaggaaggtgtcatgtttgttacgaagctgagtgcagatggcagagtggaagaaatggatcactaattttaacaatgattaatgaacagagatagaaaatgaattacattggactatcggaggcaagaaatatttttgtgaaaattttgactcatctgctgtgctgttctctgcaaattattttcagaaattctatatgttgtcaacagttgactgcattttccattactgtctatttctgttcttaagtacttttgtgttattagagatacataatttcaaaataccaatacattcctgattacttagagaaaatatatgtaacagtgtgactgttccatagacactagccataaaagtcctgttttataataatctttcattcttcctcattttatcactacattaggaatgtttgataaaaagaaaaggagggggactcttctagcacacgcagaataaaggaaaaatagagtgaaggtaggaataaaaatgtggtcttggtggcttattgtggtgctgagctgctaccaaccctgtccatctttgcatcccctgcctggcatcatgggaaggaggggccaactccttctctggtgttaccctctgccatttgtggcacaccccgtcctgtcctctgtgggtgcggcttcaggcatctcctgactccctgtctgccttcagacacagggagtatcaccagttcatgaagttgtcccagagattattttttcctctgtttgacccttccttactttagttctttctctctgctccagtgaccctggtattgatagtgagttttcacagtgctttgcgagtctcgctttctttttcagcctatcagcaattgagtgtgtatgtgtgtgtgtgtgacagagacacacacacacacacagaaagagagagagagagatctgcaacggaatacagcttatttgtttatgatatctgttcttggcaggaggcacacctatataatttctcatatggagaaaatggatagtgattttcttttcttccatcttcctccccccgcctccctccctttctctccccctctcatccttccctcccccccagatatattagccacattaaatatattgacttcagggcttctcattttcctgagatcctttgcaatagagaaatgatctactagtgtttagatcccgcgttgtaattggtaggcacttaatttcactcatcaggacccactttagtggtgacctgagtacatttcatagttagtaaatttaggattcttactattgcaggaccacccaatcagagttcagctgtgcatctgtggtcagtgctattagtccacctctcaacccatcactatttaatacttggcttggatgttaatttgaattaaaactttacctatataagggtatagtcctggtgtggttttgacaactccccattctttcctcaagaaggattccctcaagacaagatgacagggtgcttctcgaccctcccagggagtgctggctctctagagccctgacatttgtgtagggtgaagctgcctcctgagaactgcctggtgtctgaacaaatggacgatctataacgacttccttctcctacaaacgagctttccaagttttcaacttgactgttttatttatgctcttgacctgtaaaaacaagcaggctgtttaaaaagcaaaaagtacttcccatgattagagtacttagagttgaaataaattggagaatgaagcgaacattcctcgccgcttcagtggaaaatgtcgtgggggttttccttcttgagcatgttctgtgcttctgcaagccggaactccccaatctcgctggccttagggtctccaagaacggattcatgtgtcttccccttttcttgcttttaggtagtggaattatcttagtgaacatttaaaacctgtttgcgaatggttctaagtcaagtagtttgcatataattatggtcctgatgggaaaacactttggaaaaacaactagtgatacaatgcaagtcccgctcaggttacatagcatatgctaaacactgaggaaacactcacggtctttagtgaacaaggtaggggaaggctccagggagccaatttagaatgtgacttaaggcaagcatggctttttgtgtctctttcttttggcgagtgtgttgagtagcagtggtccctggaactccgcaggaaccctgccacctgcctggggaggccgccctgcacagatctgtacaaggtgggtgtccggagaggagcaggttgaacatgaggactcagtgggaggctctgggtgagcaaggtttggtggagacagtggtcactgggctggtgctcaactggaagttgcaccagggataatttaatggtgtgggatgtagagggagagttacgtacaggcagggagggggagagaatcctacaatttgtggatggagagatcaggaggaatgaaaaagaaactgtagatgatccacttaagagacaagtgattcctaaatatagaactgtctttatgattcatggttggggttgcttttgaggcagtaagtcaggtggattatctataggaataatttgagggtacttgagatttcgacatttgggtctaaacaccaggaaacacattggtgttcaggttacattcctcctcctactatgaatatcttctggctatttaacctgagtgtgttcatgcctgtgtaaatttggctcctggcctgtgtttgtactaggttggtcccccgcctcggcttgtacgaacgaagatgccacagcccagtgtctgtgtgtgcggccttcccactgccattcccggaggcagctggcacccatgtttcacccaaacaggagccaaaggcagtcccgcttctagctggttccagttttcagggacggcactgtttatttttccacagtcgttactgggtttttgttttggttgtgatcacctttatatatccctctgaactaactcatccaatcagaactggagagaaaaatgatttgaaaagtcatttaaaaatacctacttctaaggcgaattcatccaagtcatcagataggtgcacacacccccacactcatttggccacaactgctggtctgtcgcagggcctatgtgtttgatatggtgacaactatgtgtgaaaacataagacccaccagccgacaattcttcgtggatacaaatctctaggcatgtcccgggagtgcatctttttagcctgccaacccctggaatatacattgaagttaagctgagttgagtaattataatgctatggcctatagcatgaactgaagaaaattcaagatgtctgtcatccttctattacctcaggtaaataactgattgacctttttggggctctgatactttactaatcagaacctgaaatctggataacaacacttcatttacttgatagacaaaagaacaattgcacttgaagtaatgtgatttctaaatagacactgcctgtcaaaaataaatgcattagaagtaaaatgtagctcaaggagacaattagcaaacagaggtgacaccgtaaacaggtgcacccattattcccaaagcttgtggcaatatattcgcgtcttttagagtgatggaagatcatgtgacggtttggtgaattatccatcggtatcatctgactgatgaagcccgctgctgttgcagaacatttaaaaatgcatctcacaaattacatggtagctgggaaaaatgcaggttttttttttttttttttaaagaacaatgcttttctaaagctatgtgctagcatacgtaattttttctttgaaaggatggagaccatttcattatgctgggtatacagtcggttaaggttgtgcaaattcattacaatgtttgttaatgtataaaacattttccattctggttttagtgacattggattttttttttttataatgtgccatttctgaaacatctgccatccccttgttacctgtgggcagaagagagagaatgcactctttctaagaatgtttagaaaatcttttccaaaatggaaaggcttgggagataagagggaaaggacagctttttctgtgaatggttaggttggaattttctgggataggaactttaccatgcaataggcaaagaggggctgtcagcagctgctcaatatgccaggagaggaaaggcctggcttcctggtggtctttctgtgccctgtgtttgcacaccctgtactgagcactgcttgcagagtacatgcttctggaagctttccctgtgtttttttcttttcttttttttttttttttttttgctaaagcatgagagatgcttgagggacttatcattttggcagttactatttcttcttgttgctatataatcacaggaaaacagtgtgaaatattttatgtgacctccacattcatctgcccttgacttttctcatcccttctccagaataaccagtagctggagctaaggctgatatggatttaggggtcaagttcaccaggatagctgtattttgatcacaccctctgcccagatagcgaaatgagcaaaaccccaccattctctcgccatgttcctagcagcctccacgttcctgctagtttctagctggggaggtggctcatgtccattttcacacttctctctggtctctcatacatcacagcactttttgaagcatccaggtttctgtcttggagactgaagaagtgagagtctccacttgtgagagtaaccaccttgtgaggtggaaacggttggaagagctccttgccctatgtgtcctaggagacagaccccaggaagtggctgtaggcctgactgaccaaggctctcctccagagacacaagtccgtgcgttttgtgaattaaaacaacaagaataacaaaaacccctgcacagaagtaagaaactggtagaatgaggtcttcagcctttgggatctgtgtcgttgaaagccaagagcacttcttgaagagctgcccaagtagcctctctgggaattttttggacatcagctcatcggagaagtggcggccagaaggcttctgaaggatcccaagtctctaagcactggagagatttcctgatttgcagaagtggaaatacttcagctagggaagaggggttcactgggtttcctcaaagctgttctttcctcttttctcttttttttctttgtaaattaatagataggtaaagttcctatcccagaactttgtaaattattttttgagcagttttaaatatccaataaaattgagcagaaagtacagcgttaccatgtatcttctgacccctctccattaaaagacattttagttgtttccacctttcctctgctattaaatttgtgttagtgtggtacttttgttatgattgttgaaccaatattgatacattattatgaatgaaaattcataatttatattcagattcactctttgtgttggacattttatgggttttgacaactgtattatgacttgtatccatcattacagtatcatacagagtggtttcactgccctaaaaatcccctgagctccactccctcttcccctgaacctctggcaaccctggtctttttcctgtctcccttgtttagcctttcccagaatgtcctgtatttggattcgtatgacatgtagtcttttaacattggcttctttcacttagaaatatgcatttaaattttctccatgtcttttcatggttagatagctcatttctttttattgctgaataatattccattatatggatgtaccacaatcgagctattcacctcttaaaagacatcttggttgcttccaagtttgggcaattatgtgattcataataacattcaataaacattctgctataaacattcatgcgcatttttttttaaattttttactttttaagagacagggtcttgctttattgcccaggctggagtgcagcagcacaatcatagctcacttcagcctcgacctcccaggctaaagcaatcatcctgcctcagcatcttgactgcaggtatgcaccaccacacctggctaattttaaaatttttgtagagacagggtctcactatgctgctgagaatggtcttaaactcctaggatcaaacgatcctcctgcctcgaccttttgaagtgctgggattacaggcatgaaccactgcacctggccatgcagattgtgtgtgtgtgtgtgtgtgtgtatacctaagtttccactcatttgtataaatatcaaggagcatgattgctggattgcttgataagacaatatttagccttgtaagagactgccaaactgtcttgccacgtggctttcccctagcagtgaatgagagttcctgttgctccatgtcctcctcagcatttgatgttgtcagtgttttgaattttagctgttgtgataggggtgtagtggtatttcatttttgtttgcatttgcaagtccctggtgacataggatgttgagtatcttttcatatgcttattttctgtctgtatatcttctttggggacgtacctgttcagatcttttgcccatttttaaattgggctgtttatttcttactgttgagttttaagagttcttcgcatatttcagataccagtcctttatcagatatgtgttttgcaaaaactttctccaatgtgtagcttgtcttttcattctcttaaccctttctcttcttaacacttgtggaaactaagctactttagccagtggcttttatttttatgtggccgagcagcatcgatttgcatttgaaacctgagattttgagaaatttggagtcaaagatacacatgatgtatgttcttaactatgttcatgaatacatatacatgtacacatgtgttcattaacacatatgcatgcatatatgtgcaagaatggaaagaaatgcaccaaaatatcaacagccattatatcagttaatagaattatggattattattttcctctttctaatatcttgtatattccaaattttctacaaatgagcatatataacttgaataaccaattttaaaaagtaaaaagtaaatgagattaaacaaaaagtgacccctgtaaaggagataccaagatagttccgttagaagtggcataactttcatttcgacttcagagatcagggggaccaacgtttcaagtgatatccgtgataatatgtgttctctaaaaacctgctttggaaaacaagcaaatttttagtatgaccaaatttgactgtcgaaatgccagattattttgctaagctcagaatctgcactgcacaatagaaatatagtgcaaaccacaagtacaagtcatgcatgcatttttgaattttctaatagccacattatattttgtttaattcagtgtatccataatattatcatttcaacacataaaaagtataaagaatattaatgagacatttttcattcttccaaatgcaatttgtagtttacactcacagcgcatctcaatttggactggccagatttcaagtgctcagttgccacgtgtggccagtggctaccagcttggacagtgcagttctatgtgatggcagaatgtatcttttttctttccaacttttattttaggttcaagggggtacatgggctggcttgttacatgggtaagttgtgtgtcacggaggtttggtgtatagaccatttcgtcacccaggtaatcagcatgacacctgctagatgtctgaacattcgagtgatatttatcaagcagaatatcagcacagcaagcagcattacctctggtagcacaggtggaacagaaaacaactctccagtttccagttattttacatctcttcttcaagatgcattacttcatagatatcttggggtttgatgatgctatgaagtactttctgtaaagcgatacgtatgttgagttcatgtggtgatacactctattagaaagcctttataattttctggatttttcccccgtttgcatcattccatctctggcggccagaattgtcttagttttgttgtcctgccaagtcttgagctgagtggggtcttcatccttgtggatggggtgagagatccagggcaaagacattgggtggagcgaggttcagggagagcctgccaggcactgactgctggagaccatggcctctgggggagctggaggactccatcctgagtgtggttaggctctggaaatccaccagcttggcagcttgttagccagtgctccctgcccttgtagaaaatgcctgcatctagtttgcacttcttaccctaagaacactgacctacagggtaagttctccttcctcaccttgtcctgggtcagaaccacccaccttttgctggggagtaggaacccaggtgcagaatggtgccaagctctgtgcgtgctcctgaggatacggccatgggggccactggctgtgtctgaccggcggacatcaggcagacttgactgccctgaagatgaggctctccgaggctgtagggaagagatgctgttgccttgcgttggggcacagtgtgtttgagtggctcacagcatgggtcatggaatcagtctgctgagattcacaccctgggtccccatctcctgagctcttaacctcagacacagaactttggggctagtgcctcagttcttcatcaataaatgataatacccacctcataagatggatgcaaggatgaagtgagattgcgtgtcaatgcttggaactctgggtggcacttggtaaatgctagttttcattcttattgaattcaagaatggtcagtcaatgaacaaagccctcagaaggtgtgtgtgtgtgagtgtgtgtgtgtgtgtgtgtaaatacatactggctgcttcctggactacatttctttagtggcccaagtgttcctatctcttgcactatcaacctgcactgaatcaccggcaagagtatctcccctctcccttcactttccctctctcctttcttccttctcagggctgttttgactatgaattaattgtaggtttggggacttgcaagcaataatcaaagccaataaacttcaaaaggatggggaggaccagggccaccgggggagtgcagggagccgactggagctcttggtggctgtgggttggggtggtgggggctttctatgtttcttcaaaggggacaccaagtgtttcagattgtcacttaaaagctagatgcaaaactttggaaatctggtgagaggtgacggtttccaaaacagctatttttatcttttgccagcaagcatgagcccagtggaacggagagttaaacttggaatttcttggcaagggttaataatcaatgtagatctcctaacaaaggagatgctgccttattatactgggaaagttttttttcttaactgtcagtgaagcagtactaattattactccagtgtaaatgaggtcatttcctattaagagaacaaaatgctcagccctgccttgccaattcataccaactatttttcacacatactcagctttttagttttttttaaattttgataaaatccattcatttgtattagaaaagtgtaaaccatcgccataatagttgcccgtgattacccagatgagcttttgtaatgtgtgggttgtttgaataccatgtgttagctatggaacaattaggcagctgaatggatctttaaaacaatcagatacttttatctcactgaaaaaatacattccttggatgtgtactgttaaaccgtaaattccggcgaacattaagctcacgtcaccaggagaactttcggatatatgttgatcaaggacacaaagacatccaaatatcttgtcttcatgttttttttttttatgcaagcaaaaagatttaaggaatattgtagcaaacaaagggtaattgttttagcccagatgttgcttttgcacaacaagcaggttacaatgttcccacagagctgatgagcccaatcagggaaatgattaaaaattgattttgtccctgtaattacagtatgtaaactacttagcttggattgcaaaggaagtgattttctaattacgtatatactctggtgtctaatgattggttttttgaagtaatgaagagagagcactaacgactccttggtgttctgttgtttaagaaagaccatctttagagtaagcggcaacagacaaagagtttaaattgaattttcaacactgttgatgtgcacatggatttgtttattaaagagacaggggtgtaatttgattggctctgagcatcttggctttttttcatgctaaagcatgtaaaaatacatgcacagggcaggcgagctgatgagaggaagcctctccactcctcttttatcatccccgagcctggtccgatattgtagggtatcaggtttctgtgagcttctgatgtctgtgtatcctgaaagcatttagatcgaacaggtatcaaatagcttctccatcaaagttacctttgttttaaaatgaaagaagaggcttcctttggaagcgtgtctgggcagccctacgcgctctgtgttataatatttcagccgtgtcgtatgatgctgggctctgtgtcagggtggcaactgctgtctacctccaacatgcatgtgaatgctcacacgtgcacacatacatgcacatacccacacacacactcatacaggtgctaccgcctgtgtgcggaggcctgatggcagcgtgtccgttgtgggaccctgtggagtgggctaatgggttttgggaaagatcttgccaagtttctagtgcttgtcctcctctttgagacacattgtggctgtcgaataacagctcaggcacctgctctggcagaagttagcagagggtgaccatttctccgttggtatgtcatgccctctgggaggagggtggtggcttcagcatgaccctgacagcaagaaccttgtgggcggtgctgtcttcagcagaatccaactcacactctctctgggccctgtcctctcctacgcgggcttcgtgctggtgacttgggacccgatgttttgaaatgtaggttttattattattcagatatggcgtggccaacagggcaggagacaactgagattgaagggacagtttgttactcacagttcccaagaggaagacatgccatgccacgtggggatcacatggagaagcaccaggattcctgggaggcagaaggcgagaggggagaagagggacaagagcctttatcatagcttcccagggaaaggcaaggcaaggcagggctgggagggtttgaattggctcgtttgagtggtttccacaggcatggaccataggggttgcttctagttgtctggtttctggccatgggcgattagggcaggaggatagtggccccaagtggggaggccctgtgagagcccagtaaaggtggtgtgggcggtgtggtttggactggctgttttatatatgaaaggagctcccggggagtcatttaccaactctagcagggcagtctttctggggccagcaaggccccaagatgtcagggcatcagaaccttttggtgaacacacctgggtcctgggctgaggctggtttgggagctggttccctgtgccccctgggtcctgggccagggtgagcgtggctgactctgggctctccttactcttggtgttctacttggcaggtctcactgctttgtcatggaacacatcccgaatatgcctgcctttcccctgccactgctctctctccagctcacaccagatcctcgcttacttacacacctgcagcagcctcccccatgggtccccctgcctcctctctgaccccctcttgtctgctcctttcgtagcaggcatacagtgcaaatagatcatgtttttcctgtgcccaaaatctaccagtggctcaggataaaaccctttccgactaggtacgtggatcctaaaaagcctatcttcatccattctcccactcactatccatacccaggccgcagggaatgtctcagcgctccttgaatgcaccatctccatccaacctcagggcctttgcacttgctgttcactcttcctgtaccgccgttgcccgcattctcgcagggctcactcccttactttattccggtcccttgccagatgttgcttccttagagaggtcttctctgattgtcactgtcacttcctccagctttattatcttcttagagattgttatttgctggcatattttacttttgtctttcatttgaatctggtctcggaaacatgagctccatgcaggtggacacgatgtttatcactggatccccagaaatagaatagagcctgactgcaggggtgctgggtggataatggttgagtgagtggctgattctccgagagaaagctccctgggagctttccacaccaggacccccttcctgttggaaatctgtagcaacaatgggtgtgtcatttggggccatgttcatcccccagcgttgtctgagaaagagagaatcactcagtgcttggagaaaacttccagatccggttggaggagctgcggttttttggtagggtccttgttgctagtggaacttgagaatatcaagctctgggctgggaggaggtctcagaaccatgggagggaagttgccagcacccagggggtgcacactggagaagacgctctgtgtatcttgggacgcagagagcctgctcttggtagagggggttccgaggcattgcttgggagccactgcactcaagtgtcatctgtggggagacttagttgggcacccagctgtttcccctctggagctctaaaccatgtccttccccgggcagagggccgaaggagccggactggctttctctccaaatcctccttgcccaactcttttctggaaggaaagtagtttccctggctcccaattgccactcactcagatgcctccgcagacagcccctgctcctgctgccagacctcccagtgacccatccggggaagggccatcctgtgtctccccaggaatacactccacctcccgcaggagagaatggaacatgggccaggaggggaaattgaagcagccctcgcacctttcctcccaaccatccgcctcgcctccatctgtccatctgcactttcatccttccatccgcctcacctccatccttccatctgcactttcacccttccatctgccccttttctttcatcctcccttccaccttcagaccctctctttcctcctgccccccttacttttgttttccctcccacttccatttttgcatccatcttcatccttctctccttctctcctccctctctactctatctttcctccatccttccattcccatcctcccgtctgttctccttccatccttctgtcttaacttccctcccctactccctcccatccacctaggtcctctgacagaggtgaggggctggaaggagagtctgacaccaccctttccccaagtgctggactgtcctctgcatgtgcccggggtttgctgtggcctcagtgatggtgacattcattgctgctctcatatcctccaaattgtcatggtgtggggtggagacaggtgtgcactgcccacaggcaggaaactcgctggcctggaggaccgctctgtgctaaactcagggcccatctcagagccatggtgatgctgggggtaccccgtctctgctcatctcttgactggccaatcactctctccctcagagcccatgggtctgagtcgggcaggctgggcttttgctcagggagggtttctctggctccttcagggctcctgtgtaggcagctctgggacgatatgggagggaggagggtgcctcatcccctgtggggagcccttgtggcctcctgctttggtggacagaggggcccgtgcagggctagcttgtatgtctgcgttcagcggggctcattcagtgaacatggctgggctgctgggtgggtcctgccttgcctgtggaattcacagggatgggggtgtgtggacttggggtaggcccactgtgtgtcaggatgggtcagagctgccgaggcaccttccacttcctcgcttggttggtgccccccatatcttcctgtgctcccacttcccctttgaagtccctctctcagaactttccactcctgctcttgtctccccttcctcagagaggccttggaagtacctctggctctaggaagtctccctttctccctcctcgctccccagcagcctgcatccctgctgtactccagccagggtccacccaggaaatggccattcagccttcccttctttagcccctgcaaaccttctcactcccctttctggaagttgcggccactctgttgcacttctgtgccccttcctggcctccagccctgtctccaccagggccctgcctgcacttgcttaagggcttgactcaactctgcccctctcctggtgccctgcctttgatgtgctccttgtcctggcaaccgggaccttcacacgatgggtggtatctgatgggcagacctgcttggcccctgacctaccccagaggccccagtgcaccacaggtgctgggaagggagtctccaagccactgagtgaacaggcctcctaagctcatccatgttgctggggagggctgcgtgggagccttatctgtgctttaagagggaagcaggagccatcagtgtacagcgagtggaatttcaagcactgaaaacgcacctgtggaggttcccttattttgatgaggtgggggctacccaacccccacttagttcataccatgctttttgtcgcctttgcaatcttccccttcccacccctactctgagctgcaccaaactgggctcatggacagagtctcctgggtggcccctcaggttggggtccctgtgggggacagggcaaggggaggcctcacgtccaggctgcttctggttatgccactgactgtgttatgtctaaatacaagtcacttacttgcaccaaaagagctgtttctttcattgaggaagacagaatgactctgctggtgcttcccttcctccccaccctgcatcacgagagcatctgtggtcagatggagtcacctttccccgacccgcagtgactgtaacaacatcagacaccaggagcctcctcctgtttagactggatcagaaaggcacagatggaactaacttgatttcttttcctaagggcccagtgaggctgtactcgtcagctgccctactggcgtgttgggctaaccttgcccacgcaggtcagacacccttgcataagcccactaatctgttggaagagcacagcctccaatgtagccacgaggcttgtgctgggccctttcatgatttagagcatagaacctgaggggtttgtgcccatcactgccccggtgccaactgcaggagacggtgttctgatcaatggcgtgaagctggacaaaccggtgtgggacttcccccgatgaagactctctgtgttctcctgtcattggaatttacagggcctctaagtgaatggcccctggagaatagtcctagaattttgcaagtcatgagcttagatataaaatctgagtgtgtctcccatctcctgcaaccccctccctaaacataaggaggtcgtagagcaaagcaaataagtgttttcagagccggctgggtgctggggacctgtttagctcagcgataggacagaactttggaaagtgtagcattgggcatttgttcctcactccttagattttgagtgacacggggaaaaaaacaaaaaaaaatgcaaaagatcatctggttcagggaagagagagagacagacagacagacactgagatgtaatttctttccgtgttggagatggttgagacatcaggttttgctttatgtctcaagataggcaggtagaaatgtgtttacagacagcagcttccctgtggcaccctgagaaaacacttttcgagcatgcagtcagcaaacacatttttggttgccagaaatcagccttggagttgaatgaagtgttgcaagccagtggttcaatcagtacaaacttcttcggctggggctgccaccagtcctacaaatgtatcttctggttttccatgggcagaatcagattttctgaatccatagcgaaattctacctctgtgatcagaatttacaacttcactttcagtaaaatataatttattaagggaacttatgtttgccccataacatcccttccgtgacatggcaaaacaaatgagaatccaaattgcactgggtgaggagtgggctggagatcacaggctgggggctggccttccttgattaccccctagccagcagctctgcatccatcatagatgaacatcccagctttccttcttgtcctttatcacctctgagcatgccgtaggaggtgagatcacccatgtgggacttacatcagtgataaaacagaatgaagaagtagaaaatctcactggctgctgctttcctggtctgggttcgggagagaggacgttgatgccaaacacaacatctctaagcctcagtcagttgcagattcccattctgtatccactggctaccaaacaggtttggccagttgaaatttgggtggaattttggtctactgtagagggctccataaatcaatcagggaaaaagcaaggacccttgggtacttcttcactttgagaattctaaagaagagagacagcgagagagaaagagagagagagggagagagagagagagagagagcccttataatattagctcctatttcttctgtcccatatagagaagataagagatggttagaagttctttttgtgcaggtggcgatttcccactgaaaacaagctgaggaaatttggttcattgcagcaaaggtcacatagttcccattttttaaattgctcaaagaattgggggcagtggggctattcaagttttttaggctctcaactaacccagcaaattgttactttggatgaatgctgtttatgtgacttactgaagtcgacttatgtgacatttacagtttctaacaggtcttatttttgcagttcctgaccaccacggctttaagaatatccttcaaccgggagggagatccattgctttaagacttgcctggtaaggaccatcgatttgtagtttgttgaactggtgtctgtctgagtttgtggggaagtccaggctgccttctctgggctgctgatccctatgcagagctatggagaaacttccagagtcacaggtgtctgggaggtagcatgggttccatatcttgtgggcggggtgaactacaatgtggagacatgttcttgagtctctgaacaggttcccccatgaggcaaagcccaacaagggtgacttctttctctcttgcgtgacaccctgagtccctatctgccagccagcagcctggaaccagggctgagagctggtggggcttttgctaaaggccgagtgacctcgtccaagtgccacctgtggtcgggctccccatcactcaccaggtgactcagtggcttggcccagtcttggacaaatcctgtcccaaagctgctccgtgtttgtcacctcaatcagactccagattgcaaactcctgacggggtgtatttccggcatgggagctgatacaaacttaaaatacaaaacaaagggtgacatatgtatttgatatctttggtggcctcatctgaggctgcccctgatatctctgttaactcaccctcggttgtaattagcccagcccaccttctcctgaccacacgtctcagaggtcactacataaaccagggaaattgatagcagaattatgcactcagaaattaattttatgttgtactgaatatatatttttttttattgtgactttatcttgctggaaaagtgcttacttctgattttgtggatattcctgaccgtggattacttttattttgatttttacacaacagttatattagaaatttgctgttttattcttaccttcttagtaaaaatccttttatcacacaatgggtaatttatatccattaccaagcctttcaatccttttcagtggggctgtcagtgccgttggcacagtaatgattaatgtgatctaataatagtgtaccattatattaccttagtaaaacatgtaccaacaccctattccgatctaccaaattcatagcttcctataatatttttgttgaaagacaggattactatttttcaaagctgattttttcccctttaacatatttaatgaaattcacaattctttgccttagtaatcctgggcatgtgactgggcttgatgggtgaactccacatctgtaggccctgttgtgatttgtcaggagaaaggtccaaccatcccagtgatctgtcagagagattattttgtttttgttgggcctggattgttttgccttaaaaaagaagaaaaaaaattgttgggtttccagtcctttctgatgcataataaggaaggtgtgttttagattgaaaggcaaagtaggaagcaatttggttttttcctcccctctgtcacctgcttctgtctgccagtgaatcggaggtatagccgagccagtggaagtggctttaaaccgcttccccagaaatgcccctctctgacccatccactcctctagctgtggccaagcctctctgggtctgacatagggtctttcacatttggcattattgaaattttggactggatagcgattggttgcggggccctcccgtgcactgcagaatgtttgcaacatccctggtctctgcccactagatgctgatagcatgcctccaccaacacttcctccattgtgacaatcaaaataactccagaaatcaccatatgtcccctggggggcccaatcatctcttgttggtctaacctataggaaaacgagcagatatttttggcatgtcggggaattcctgtcagagttccagagttccatggtgctttttcggaagtctttggctttgggagagaagatgtgtgggtgaagacgacgcagggcatcctttccttggctgaaatacagccctcttcctcctctctccctcctcctctgccatgagcctggcccgagcgagggcctgaatcttagcgtcttccacttaaatcccattataatcacgctcatgattgataacattccaccttttcaaagggctttaaaatctgtgtcaaccaaggatgacattattgtagtgcgggcgagatgtattcaaacaattacacgctcaaatcaaagtgggaagttttgtccttctatctcggcgcctttgtgtgatgtggcttcagccagcaccacagtcctcacagccccagagaccttcaacagaaaaataaatgggaagaaacaggttttgcccttggtaccattcagcttggaaggcagcttgagtatttgggctccttagggctagagggtgggggagcaaggagagattgttgagcataggagagagagagagacagacagagaaagagagacagagacagagacagagagagagagagagaaagagagagaccgagagagacagaaagacagacagagagagaaagagagagagaaggagagagacagagagagagagaaatccttgtttttgatttggaacaaaaactactgctgcaactttggctcgaaatatgcaatcaactgaaatcaggaaaagtattttgaatacaaaatttatattgaaatacttgaatcttgatacgtgtgcacccacatacatgtatatatttaaatcaaggatatagataatgaggaataaagcttctgtcataaaaatattgcctgcagtatttgcccttagataattctgccacattggaatacagttttgtactgttaacatttccatatgagacactcttgcttgtttttacaactgatccttgatgataacagcaaatgaggaaatggctctgatttacctttgtgttaggaagatttggaatccatcgtgttatttggtgcaggaagcattttagtgacctactcctttactggtttctggtctgtctctcctactgcgacgtaagagtggtgagggtaggggcttatgtgttttgttccttgtgatttcctcagttcctgaaatggtgcctgatgcacaatagcttctcaataaagctttggtgactagatggatggatgggaggatggatacatagatgggtggatggatggatagatgggtggaggggtgggtgggtagggtgatggatggatggattgatgaatggatggctggatggatgagtggacggatgaatagatgagtggatgggtgggtgggtaggtgggtagatggatgggtggatgggtgggtgaatggatggatgcataaataaatggataaatgaatggatggatggatagatgaatagacggatggatgggtggataaatgggtggattgatggaggatggatagatggatagatgggtggatggatgaatagatgggtgggtggatggatagatgggtggttggatgggtgggtggatgggtagatagatgaatgggtatatggatggatggatggatggatagatggatggatgggtggatggatgggtgggtggatggatgggtgggtggatggatgggtgggtggatggatgggtgggtggatggatggatggatggatggatggatggatggatgagtggatggatgggtgggtgggtggctggatgggtgggtggatggatggatggattgatggatgggtggatgggttgatgggtggatgggaggatggatggatggtggatggatggatggatgaatggatgagtgggtggatggatgggtctctatctcaagccctaacatgtaccttagaatattgggctcattgatccaaatgaaatctcacttttaccatctattcattcattggcctcccaaacattttttgaaacctttattttcaaaatctaatgatcagttataacaaggcattttcttttagtctagtgttttaaaatggaaaaactatgtctagaactgtgctaggcaacctctgtgaactgaaaaccaccctgttataaaaatgtctttaaaaatccacaagggcacatacacagatgactgggactgaaggcgtggaggtcacgtaggcgaagatgatctctttcaaagtaggatgtggatgagggatttatgaggctgaaaggacttcctgcccacgtgactggatgtccgtctcctgggcaaacctctgcaatctgcactatattccatgttcttctggagatttttgtgtgtcctcttcagccctgccatgacttggtctctgtgggacttgccactgctcagtcctattaggtcagctgtcttgaggggataggctgaggctctggggagtggggttcccaagttctggcatggtgtatgcaatgtacccatctattggaaaacttattctcagtgataagagtggtccaagttacctcaccttgacttttaaactatagtaccatggacatcatagcagtaccagtgagaatgtactgaagaaaaaagataaatgacctctctgtctgacaatgcatagcaaaggtataggctttggaagcagatttcctgggttggaaccctggctccaccattcagtagctgtctgacccagtgtcaaggaacttgcacctcagttttctcatctgtaaattgggaacaacatgacagtctggtagattacactgtgtgatgcacttaaaacactgcctggttcaaagtaggcatttagtacaagcatggcaccgttgttattttcatttcctctattccatcatccttccccctttctccatctttattcaagattaatgaaaatgtaggccattttcagataattaggcttttcctctcagtctcataccagtgctaggaaccccaagatgttgctaggcatgtggtctttccagcatcccttgggaccttggttagcaagttcagagaatgtcagaaagggtggtgagtttcctaagccaacttctccatcccattcctttgtgaaggagcattgttgacacatcactgggggcttgggatttgcttggtgtttggagaacgcattctgagatggatgccacgtggtcatggtgggtgggtggggacagccagcccttaaaagggaggggaggcctgtggtttttctcctccaccccctcacaaatgagactgttttccaccatggcccggttttatatttttagcttccactgaaatttaatgttttgtttttggtttattatgtatgcaagtatcttgctgataaattacatgtgtaattgtaccatcgtaaccactgctagtcagcgacaacatataattaaactcacccttgtagtcattgaacttttctgtccctgacaagatcactgaccactccaaggagggcatacctccacgtatgagccatgcgagtgcctgagaggccggaccaccccgggggcccccgtgctttcctgcacatgtgcacaggccgacttcccctggatggccacacatgggatgcaagggttagctcatgaggcccaggggtgcttctctctttatttctgtgtctatgcctggatgattattggctccagagtgggtgcctggtaaatacttttgtgagtgaattggaattttcttcagtcgcctctgagccctcttttctcatatgacccccaatgcctatcccgctcattttttaggggtgtttgttacgttgctcttatgcctctatgccaaggctacagcctgtgagtcacatccagcacactgcctgtgtgtgttgggttttttgttttacatttaaaaatttaaaataattgcgataaaatacacataatataaaacttactatcttgaccattttaaagtttagagttcagtggcattaaatagttacatcactgtgcaactgtcaccacctcccatctctagaacgttttgaaacggaaactctatacccattaaataactccccattctccctacccattccaggtcgtggcatccactatgcacctgtctgtctctgtgaatttgactactctaggtactttatataatggaaccatatagtatttaacattttatgactggcttattttgtttagtcgaatgtcctcaaggttcatccatattgtggcctgtgacagaattaccttcccttttaaagctgaaaaagattctgctatacagtatgtatataccacattttattttactttttgttcgcttttcttttattttgggacaggatcttacttttgttctccaggctggagtgcagtggcatgatcatagctcactgcagccttgaactcctgggctgaagtgattttcctgcctcagccttctgagtaactgggactacacgtgcacaccactactaatttaaaaatttttttgtagatatgggatctttctatgttgcccaggctgcacttgaacttctgggctcgaatcatctgccagcctcagcctcccaaagtgctgggattacaggcatgagtcactgcacccggccccctatgttgtttatccactcacccatcaatagacacttgggctgcttccacctcatcactcttatgaataatactgctgtaaatgtgggtttatatgtttcttttttaaaaaattttactttaagttctgggatacatgtgtagaatgtgcaggtttgttacataggtacacatgtgccatagtagtttgctgcacccatcaacacatcatctaggttttaagccctgcatgtattaggtatttgtcctaatggtctccctccctttgccccccacccaccaacaggccctggtgtgtgatgtcctgctccctgtgtccatgtgttctcattgttcaactcccacttatgagtgagaacatgtggtgtttggttttctgttcctgtgttgtttgctgagaatgatggtttccagcttcatccatgtccctgcaaaggacatgaactcatccttttttatggctgcatagtattccatggtgtatatgcaccacattttctttatccagtctatcattgatgggcattttggttggttccaagtctttactttgtagatagtgctgcaaaaaatatatgtgtgcatgtgtcttcatagtagaatgatttataatcctttgggtatatatccagtaatgggattgctgggttaaatggtatttctggttttagatccttgaggaattaccacactgtcttccacaatggttgaactaatttacactcctaccaaccatgtaaaagcattcctatttctccacagcctcgccagcatctgttgtttcctgactttttaatgatcgccattctaactggtatgagatggtatctcttcgtggtttcaatttgcatttctctaatgaccagtgatgttgagctttttttcatatgtttgttgtctgtataaatgtcttcttttgagaagtgtctgttcatatccttcacccactttttgatgggtttgtttgtttttttcttgtaaatttgtttgggcctatatgtttcttcaagaccccactcttaattcttttgggtggaattgcgggatctatggtaattccatgtttaattttttgtggaactgccatactgttttccatagtggctgcaccatttggcatttctgccagcagcgtgccaggcctccacttcttccacacccttgccagcacttgttttttccatttttatgctagcagccatcttcatgggtgtgcagtggctcttagtatggttctgcctgttctcatatggcctatgatctaagagtggcttttccatttttatatgattgaaaaaaatcaaaagaaaaataatatttcgtgataccgggacattgtatgaaatttaaatctcagggcccataataaagttttattggcatgcaggcactcctatttgtttatatgttgtctgtggctgcattgacactacaaaggcagagttgggtagttgagacagagactgtgtggcccgcaaagcctaaaatagttaccacctggcactttatgggaaacccttgccaatcctgccctatggtaagtgttatatgctttatctgtttaacctcctctctaatccattttgcagacacagaaactgaggctcagcaaagataagtaacttgtacaagtcacatgttacctaaccaggacacatgtacctgtctgtgtgactccaaatcttgcactcctcactaccatattaaatgaacaaaatcatttgaagattgctgtttctagggaactgttttttttttttctctttttcttctttttttttttgagacagggtttcactgttgcccaggcttgagtgcagtggtgtgatcactgcagccttgacttgacttcctgggcccaagccatcctcttgtctcagcctcccaagtagctgggactacaggcatgcaccatcacactactttgtttgtattttttcgtagagacacgtttcccaggctgatcttgaaccactgacctcaagcgatcctctcaccttggcctcccaaagtgctagggttataggcatgagccactgctaggcctctaggggacttctttgggtgtttttagtaagcctgaggtcaggtcctagttgagaaaaaaaaaattgtaattatacaaagatgtgatgttgtctttgggagaggaagccaattgagggagagaatgaagatggaaggagatgttaggtgagctaagctttcctttatttcttatgttgaaattctaagacccacgccttatgttgcatggcaagatgagctttcaactctaagaaggagatagttttaggatgcaggcatgtcaacacgcacaggatttcctcaggattagaagaaaagccaaaccaatcaataacttcttcttgcattaaaacagtgaattatttccataaccgagaggaaagtaagccagggtctacaagggaagctgttgattgattccttctccttcattctttggatcgcatgttgtttggggtgaatcgtagtgtagatacctttggcccaccccaacacatttttccccaaatgtaaagatctgctctcccatctcccagaggctgtcttgggcactccttttgcctctcgggctctgatggtcagtgggttcgttgttactgatgagggagtggttagttctctctctctgcctcctccccttctcgccaccctctctgtccaccaggatgtgtggacttggtaccaggaaccttctgatatttcttgatacagaggacaaagcgtggatagttatttgttctttcttccacgggagaaaagtcttaattgattttacatatttctgtgcattatggaaatcacccatcagtcccaagtacttaggggatgttgggggctgcaggaaatggctggtcttgcgtctatctcaggcaaagagattgtggttctccttttatgtttgggaatgcacgacattccccccgcctgccagcccccagtaactactgtatttcaacaataggcttcacgcggctgcagtgtgaggcacaacagtggttttcatgaacttttggctgtggtttaggcctggcagagctggactcttacccttagagttttctggctcgattcattttgcacaaaggaaagtacgataatcggagttgcaggatgataatgtgatcggcatgttagcacattgcaagaaagacagaaatgactttggagtttgcatttcatccttgaaaatgtgcagcgctgcctgagccaaggggcttgtacttagtaggtgcttgctaaatactggaagaaggggtgagggtggcagttgctttgtgcctgagaagaggcaggagaagtatgtgataacctatgcccatacattttggaaatagggatagctattagattttttttttcctgtttaaagatgaagtttgggtcttgacctggtgttggtctctgcctgcctggttgcccagcaggtggtggtaacatggccacaaattcatttgaccttgagttccctgactcttctactccgacggtccctgtctttcactatctcttgccaatgagcagctaagcatttattgagggtccctgtgctcagctctagagggtggggtgtggcccccaacacagaggagcttgctgcccagaggagagggagttttagctggggaggtagaggcacgtgtatttgctgaggtggccgtgaaggggtgcatgtgttgaattttccctacccccaagtcatttttattttcttcctgcaatactgcaagaaaataataaagtttttctaatgtggatgtgtgtgtattatttcatgtctgaaaacagttaatagtacaaaatgatgctcttgagtgagctgaactcaacagaataatttttattcctcaacagaatataacttgagacaatattgacagttaaaaaatgtaagtatggcatatgtgggaatcattcaccaaatttctgtttctcctctctaggccccaatatgtgtgtgtgtgtgtgtgtgtgtgtgtgtgtgtgtgtgtgtatttaaacatgacttcaatgtttttagaaatgtgacatcctaaatatgatcaggtctccagtaacaagacagtgggtggccaatgcccccatgagtggcagactccctagagaaggttttggaagtttgcggaattcttacaagatacacctgccctgaccctccaaactcaactcctgcttccttaggtggggcgcactcctccctctactcctacagggactgaaggctgagagaagcttgtgagggaggttgaggcaggcatgcatagatggaggctgcataggtgtgggaaggagtgctgctcttggagtgaggaggctggttctgatgtctatctgcagtcctcagcctgggtgacattggagagcctcaggccattgcagctgcaggctgctacctgaagggtgggtgtctaagcttctttgtaggtcttaaacagaatgacctagaccagggtgtcaggaatgtacacacagagccctgggggtcttggtagcatgcagattctgattcagcacatctaggggaatgagattctgcatacttaacaggctcccaagagatgctgatgctgctggtccttggaccacactttgagtagcaagagactagagggataattctcaaacttggctatcaattataacaacacagggagcttttaagacccgccaatgtctaggtctgctcccaggccaatcaaatcaggacttgccctacaggaaacagtgtgattggaggcgggggtggggaggttgtctgctggcttgtagccaaggtatgaacggctggggtagtgtcgtggatctccaacttgggcaggtgtcagaattgcgtggagggctttgaaaaaacaacattgggccccaacccacattttcagattcagaaggtcttgggtatcgtccaagaatttgaatttctaacaaatttccaggcaatgctgtttctgcggccccagggactctgctttgagaaccactggtctaatgtaatcccctcccagtggatattcatgaagcagaaacctccagggagtgggagctgggggctccaggacacgcagagccctgcctctggggtcattccgtgcacatctgttttacacagtgagcagccttggaaaactttcacttgaaaaaaatgtgggtagaaaaaaatgtttgaaaacctctgaagcaaaggcaagacttttaatcatgggaatggtgaatgttcattctttaattgaggggcaaagcaggcaggatccttggtccctcttgttgccagatgtggccgtgtttgctcctagtactgccctgtcctgcaggaggtgttttccatgctgaactcctggctccctcttgcatataagagttcacacctgtccagaggcctccatggggcccagaccagtgtcgggcagggcaggttagcttgcggggaaatccaatgtgtgcagctgctagcacctaatgactgtgtactgggcttcaagcaccgtgctcatttatatgcatgatcttatttaattctgtagtgacctcatataataagtactgtcattatcccatttcagagatgagtatttgatgctaccttccagactgacagtgtccaggaaagcagctgcagtggaggtggaagggcagtaggattccctgattggtaagggcagtggaatgtcatggggaagactttgtccttgttggtgtcttgggaagagagcagaacagtgccctgtcagccctgcaggtcccagaacccactacctgggccaggtgacagaactcagagcctttggctgcttcaggagatgtcaccatggctgtctcttcttggtcaaagttccagttggccaagacatcctggggaaaatgggcagggaggttcctcctgggtgaaacccttttgtatggctcttgacagtgcagaggggtctgggaggagattctgtgaactagccggggtgaagggtgggtggatctctccagggctcaggtcctgtttctgtggctgccatctctaaccatggaaggctggcttggacagctctcagcttgctctctacccccagggagcctaaaatgtgtccaaagctgcaggtttttgctgagacatcatgcaaaagctggttcttctccctggtcacctaatgtgcttggggcagaggctgcgagccttctggttggaggaagggaggcacagatgggtgtgtggtcttccaagcagcatctaggtccttctggtggccaggggatggcagcatcctttcgccctcatgggagccaccctctgtcacctgtgtatttccctgggttcccttcatgggacttgggcctcgcctccgtatttacagctgatgttggcagtggagaggggaaggtgagagtaaaacttccagaagaaaagcttcctatgaggtgtttgagatgctccacgatcaggcacgaggccccagccagggaagacccttccagtggccagaacggtgctgcttcccctgtacctaaaacatctccctcctcctccaagagattttcaaaagagtcttgaagctcagtccgactgcagcccaagcatctgcccttcacttccatcttcaacttaaatgagatgcatttaaggaaaggctggcctggaaactactgtgatcagtaccaggcacctttttcctgaagtccttttacatctaaaaaaggttcatatggttcatcaccatataatcccttcgtatgcctggaaatggtacgtgggggaaagtttacatccagtttaacagaatttctacttaagtgctttttttaatggcccacgtttgatcttaagccacttctttttgaacccttgaaggttttattactgaactttaaaaagaacattcaattcagagggctggcatgttcttgaatggagctgcattttgaaagaagggagatgaatttctttccccagcagagacacaggtgtcacctatcaagggtggtcagaactctattttttcctcagtgtagcaccaggatgtagtgactttctctctttgaaggactaggcatgcagatattattgttaggatttgtagaaatgatggccgctcgagtaaacgagtggccaggagctgggggtggaaattctcccacaggtagccctttctcaagactaaatgaacatcccaggcagtgaacctgcctgtattgttatgcatgtgtatagcatgggagcttgggcgccaggcagcaggagccccctggatttgcaccgtgccctttatgagttaaattttccccacaaacttcatgccttttttttttttttctcaagacggagtcccccccccctctgtcgcccaggctggagtgcagtggtgcgatcttggctcactgcagtctctgcctcccaggttcaaaggattctcctgcctcagcctcccgagtagctgaaattataggcgcgtgccaccatgcccggtaatttttgcatttttggtagagatggggtttcatcatattggtcaggctggtctcgaactcctggccttgtgatcagcccgtcttggcctcccaaagttctggggttacaggtgtgagccacctcgcctggcctcatgcccttctttaaggaatcccaccgggtcctctacagtaccctcttccctttagaatagcgggctaattccaggtgcccattagaaattcaagatgtatcaccacatactctgactcaagacccttggttgcaactggaccataggaggtatgcccaggatgtccccctgtggctcacaccccatcaccagctgtgcagaggcaccataccctgtctttgctttgccatacagtgcagaggatgtgcaaccaagaacaggtctcttgatgaccatttgcgtgggagtttcctaatgctggtagcgttggggtcagaatctttacagcatcctgggctgttgaaagatctttgtcaactgcagaagaacggtgtgctgactccttcatcctgtctcacaccaaagaaacttttttggtatctaggagacttgagaccaaggaatacattatagcgatggtttcaggattgctgggagaatctgtttcaggtgtaggttcccattccccatatctgcaggtatgccagtctgggaaggaacctgggaatcttcgtttctcccagtctcctttggcaatgccagtgggcctggaattatagtaacactaaacctaaattttagtgggtggacctcagaaggctggattctggaagcttcttacttacttctcagctgcaagactttgggtcaaacatttttgagctctgttttcttacccgtaagagaaattggccctatatgacttctaagagtccctccaattctgaagttgtagcacattaaaaataatctgcattttaggcctggcaggtcacattccctgccaaagggggggcctgggaaagaaaaagactctacaatgtgaaagtgtgggcttcgtggtatgaggccaagtttataaaggtagcctctgtgaaagaatcatttgtatttattgaaatcactgattttaatcaccttggatgctcccttgataaaaattataatcctctgtaaattatgaataccttgaaattcacaaattctatcacttttgtgattggcaacattaaatggcaacagctcatttaaataagcaacatctggacattattatttttagggatttttcatctgttgatttagaaatctggggcctttatgaatcttgcatgaatattcttttatattcacatctaccatcaagacacaaagggatagccaaaaatattgtccagtgactctttgatgcaatgaatgtgttttttaaacaacaaatccattgtgaatgagagaagatataaaataggctgcctgtgagggtaggtggtgggggtagcttgatccttcaaaagccagaagagtccagcaattcaaagccacagtggggagaaggtttagattttatatataataatataaaattttaagatcacaatatgattttggactgatgatattggaatatggcattcactagttctcagaataatccaatttagaacaatgcattctgagcaggtttggtaaaaatagaagatctatcatcccatggtataagataatgcattaatttttatgagtgagttatgaagatgtacaactcggttaagagttaggataaacataatattccttaattaatccattatgccatggtacacatgtgccatttttattaccttaaaaatgaaatatgtcaaaaaaggaaattgctgcttttttatatcaaaaaagccttttttgaaaaatcataaaatgcctaatctaattcaccatataatactaatgagcttaacaagccatctcgatgcacagtttaggataaaaggtcatcagtttctggcagtcaaattccactacttttcagacgaggcaaaacctttcggcaccaaatattggaaatggcatttgtgattaagcgttattaatagctatttgttatgagcgtgggagagttttagaaattcatattataccctcctcaagttttctaaatcttaccattgcagatgccaagagcaggcatttccccccgtcccaccccggtgaatctgattaacctgttgtccatcccaattctgggtggtgttgaacaggaatcttacattcacacagcgctttccgtttcatgccacatttaatttccccaaatctctctgaatcccctacatttatttcctggggtctctttgctctccaggagccttcctgtcctctgtatttgccactgtcatctgcctggtgtttcttttgtcttgtcacagaaccggccctgtggaggtacagactgggcaccttcggccgcagtgcatgcagtggctgcagccagcctcgttatggaaaagaattgcccagtgggttgagggaatgggcaacagcacactagaatcatgaggctgaaaggaatattgccgactggaggtcatttttcccaactgaggggcaatagtttgccactataaactgcacattgcagtcagtatatgttttattaaaccatttaaggaacttgggagccatttcatttaaacttcctgcgtgaaggaactcagggcagagcccagagcagctcacaaaagaggcctggagtaatttgccgaagaaataccccaggtacccggcaggatgatcgcaacggggggagcctggcgagggctggacccagcgcttatagtactcttcgacgcctgagtgcacaagtgtgtgtgtgtctggaggttcgagtcctagctctgccgctaactagctccatgaccttggtcaaatctcttagcttcccctggactatttctgctgctgcaataggaggggatggggtttgataggagaggctgggtcctttccagctcagtgattccataaaatgctggatcatcagggggttgcccctggaactgtggttctgggacgccccatcaggcccctgatcatcacaacggaaagtcagcttttgtgtctgccctgcctgggaagtgattctggctgtggacgttttcataggctctggggactgaggctcccctgatccagtggtgacgtgcgggttctcagcatagagcagggaaaccggcgacaacttacttctcatattaaacagaaataacctcttcacatgataattttatgtctgaggaaataggaagctgaggtgcgtgcactgtgcctctgagcctcagttattctgtctgcaaaatggggtagcggcgatgcggacgctgttgctttagctgtaaagggcgacagaagggatgccctgggtcccttctgttatcactctgggtaactttgtgattacaatttagctttaacaactcttgcgaattgcatgactgcacattccgtgttcacagtttgtgcctaggaagaaaggaaggatgaggtgagatgtgctttatctttaagagtaatggacagagtgcaatctgcattgtagctttctcagccctaactggtggtccttagtaggtggctttaattctacaaagttatataaccgaatcttttgtctaattggtaactatatttaggaggtagagaaatatgtgagctattcgtttcgattaaattttttattatgcactctgcatttggattgacaactattaatattaaagagcttggccaaattgaaatttgtattgctggagagacttaaatataatgtatgatgctgaaaaaaaaaaagcccagggaaaaggggaattaccaggctgggtgcagagaggtccctgccaggtgccgatgtgggctaggtagaatctgccccacctctgcacactgaggagggaggtgtgtagaggcctctgcaaagccagtgtcaaggtctcaaggattgagatactttcatagagatgatgctaaataaagatgtagagcacgttttagcaacgtatacaaataattttttataatcactgtttgtatataatattttttcccagcactattaagaaggtttgggggtaaggcagagaaagtcgttctaaaataggatgcatggagcactggtgcaatgatgtggaaaagggaggacagcttcctcggaaatcctaacgcagattgtgttgctctgctgcaagtcctcgggagatgggaggctctgtccgtcctgcggcagggagggctcaaggccacagccaggtggggaacgtgctgggagcagattcctgggcatcctgggcctgctgtgggcaggccctgggactcacagccatggttctgcgtctttggggctgactcctttctaactcctagcaatgcctgtggctttgcacagtgacctgggttgtcacatgcagaatcctataggatttgcacgaagacccgggtggtcctcagacaggggaagtcaggtgtctgggtccatgcggccactgaacagcagacacaggacaagaactcagttctagaatgcagtctgtggggcactctcaagagaaagtgtcctctttgggagtctacaatgctacagggccaagggtgagcccacgagcctctggcgtctgtgccctgttagctggtctcacggactccagacacctccaccttccacgcattttctcttgttgggccctctatatagaatgtcagccccatcccaatcctccagataaacccctcaactgcccccagggcctgcaagcagagagcaatcagtatgtcctgaatgggtgcagcagacgcagtgcaccagatttgactggcaagggaggggaagacgaccctttcagactggtggtggccttacgtccttcatccctttttaccccctgctgaactataaactctctggtggcagggacatttttcttgtttttacataatttttcctgacattgggagctagaatatcaatgtaagaaaaccttcatagacaggggtgctcaaagcattggtggttctggctcaatggattttaggcacacacgttttcatctccatttggcattttgaagctcccaggagctcctagatgggtgatgggtttctgaggctcggctggtgtccagggtctcctgggatggggacagagcacaccaccttgtgtctccactgctatacacctgctccatctcccagagatgaccccagcttctggagggcaggcgccttccttgtcaccccaccagttagctcggtggctggtgcatctgtggccatggcaggctctatgtgatggcgagagaggcagggcaagagaggcagtgcgggaggtgcagggcaggggccttggcgctgcctccaggtttctgtgatcagctaggttcctagcttctctggagagcagacagcctggggggttgtttcctgaaagggaatcaggttccctgtttgctttttgacacttttttttttttttgagatggagtcttgctctgttgcccaggctggagtgcagtggtgcaatctctgctcactgcaacctccgcctcccaggttcaagggattctcgtgcctcagcctcccgagcagctgggattacaggtgccggccaccacgcccggctaatttttatatttttagtagagacaaagtttcaccatgtcggccgggctggtctctaagtcctgatccacttgcctcggcctcccaaagtgctgggattacaggcatgagccaccatgcccagccgacacttttttattaggcagggatagcagatactatcggtgccccttggcagccactcaccactcagggtgaggcttcctcacaccagcatccacgactctgcctgggtgtgtccttcgtcactggtgtgtgtctagtctgtcatgggggcaagcacacgtgccagggagttaacacctctggagcacccctcagtcgatggggatggggactggtgggtaggcagcggtctcctctctccctggatggagcagcgtgggggagtcccgctcagggtcttaagagttcccggttggactcaggcctggtgccctcagtgcagtgcactttttagcctgctgtgcacaggcctcctttctttccccacctccccactatcccctggcattttctgggactacctcctgcacaaactttcgcacaaacttcctgcacaaaccgcccgcatttgcatcttcatctcaggccttcctctgagaaaacggcgcagacgaaggccagttcaatggagctcgaaccattggagccgggctcacacacaatctgatggatccttcttaaggccaggtcccttaggctttctcatttgagccttccagaagcctttgatgggagggagctgaagttgttatcccattctcctgcaaggaaagctgaggtccagagactttgcagagctagaatccaacttcctgcccagctcctgccctcctaacttcactgattcaacaagggggagcctgggcctggacctctgcgggggccaaccactgcctgtccccagctaaatgggagggagttagtgagttatgtgacccagagccggctgctctgggggcagttggggccagcaggtgaggtgacctggtagggtccctgagcagtgctttgctcctattaagtccaggaggaaagcggtgaggggagagggctgtggctatgtgctagaaaggatgaaagcctggggctcacagaactgccccacgtggaccactcagcctgcaggctcttagccgctgcaggcaccatctgggggaaatgatggacggtggaccagcccaagttctcatgattgggctggagagaagttctaggggcaaagcatatttgcatcttcctgacagtttgcaaagatgcctctgtcagaggagtgcctgttcttaggaggagactgcttggggcagacatctcttttcccagctcatttgctcctctgaagttctgcagaattaagagcccaagggagtagcccagagaggagtaggagggctgaagcttggaaggcaggaggctgagggttttgctttccattagttccagggcctgaggctgcattttctcttgtctgggccttggttttcccaaatggactggacagtgtgagttccccactgtagttgagtagttgaggaagctcatatagagtttgggctaggggatcacctgccaggagtgagcttgtgcaggggcaagagtgggtgcaagagagaccgtgggaagggaggggagctagtgtcctcgcttgaccctcaacccattcctgactggctcagtttccccaattgtacaaaacaaggaaggaaaatgcacacttcactgtgtatggggaggggtggaaagtattctgttaattgagtcaagtgcttggcaaatggaggtgtgatctgagcggtgagcagctgggtatttaatgttcttaggagaatcagctcaggctgctctgcagtcctggctttaagcccctgagatagccctgagcctcagcccccttcatcactgagaagctgcaggggtggttgtttcagctttgccctggcaccaacattggaggctgagagtgtttcttgggccacagtctcttgccaaggttgggttcagagggtgaccccagatctgggtttggggtttggggtttgggagcccactgttcaacacctgaaggactcttctaggcagaattgggtgggggaccaaggcagggattgggagccatctgccctggcccctggtaggcactggctgggcttcggcaggaggggccagcgtgggtgaggaaaggactgtgccatcaggcgccctgtcctccctcggtccacccgcagtgtagagcctgggccaggcatggagtggatcctcccgacgtatttagtgatttgatctgacagagggtcacatcggtttttttcccccctccaaattttaatatcagattcatttattatgctgactgcaactgacaaatgttcacattattcacccatttattcatttgctcatgaaatctgtgttgagtaattgttttgccttattggcagttttaattctacactcctttttttttcaaaaggtcagtggcttgctagctgaccaggccagtgtgtgcattccctggagagaatttttttttttttttttttgtaaagagatgcttgtttacactggtcagacttcagctttgagtttctctcttcttttgttgccttggatcaataccttggaattcccaggactcagtaaggctcttgtcttatctctctgtcaccctatttcctggctgaatatctgagccatctcaccccacagtcagattattctcttttctctgcttattcatgtcaagctaagatctacagacacaccaatatcaaaatgtatgtgtatgtcttgggtttgtaacacacttacctctaacacgttgatagagctaatgaaagctgtcaagtttgaaatgtctctggatttgcttttggcttttgcctgaaagtacatgagattcaaggggaatatttcacctgcgactttgatttggaaaattgaaaagttggttataagtttgtttgagaaagaaggcgaaaatgttctggaaaatatagttccagtaaagttacttctgagctgaaacattcaaaatgcagagatctatagtctggtatgttattttatggtaactttctgtatgcagctgtgtttgctgtgaaaactcacatttctgtatggaacactgaatgaaatatgaatgtgctttttacaatttagtacttttaataaaagatttgtgagcaaaaagcttaagtgtaagagccacaaaacatatagataaaaatatagccataatcacacatcaaaccctagaaaattcagtatgtaaagaacatcagtaattgagagaagttgagggaaccgacagaaaaaattatatttttatatatatatatctctccagaattctaaaggcatgaatccttttagctgggatcagggcttctgagttctctggagtgggtgttttattacagtggatgctttacttagaaggatgtaatttattatctcgaattcgcatggcaacatgaatttggatttgggtttctgggagaagtttacaattagtcccctcacatatatttataactttgaaaaaacacttgatgttaaaataacttaaatacctccccccccttttttgattgatatgtgaaatattgccttttttaaaaagaaatgaaaaactagtcactgctaaatgaggcgtggccactgtgttcagggggaacggtgattaggtgggcactgttcccagggccagaggacgtgcaaaaaaaaaaaaaaatctgttctgcacctgctttggctttacatgagggatgcttttaatttttctagcttttcattgtttcctcattggaaactcctctcttctaaggagagctctaacagagggtatgaggaagatgtgccttttttttcctctgttcctggtctgccacattcacccaagagtcaccctaaccgttcattctgctgagagccccttctcctgatacgtccctcctgcttcataacattctcagtgggctgtgattgctaccgtttttctttttctattaaaatacagtccgaacttgattatgtgtttcagtatttctcagcctgacccacaagtaaaaccggcgacaatgatttagttattggctcgtgtttattgccaatgcaataaggttgtggtgcctgacattttcttctcactgtgttgaagcttttagcgagttgctcttcttacccagaaagcagcgtaacttggcctctctttgcagatgggttacacattcctttaacactggcatgctcctctaaccttcctgggtggctttcgatgacttaaacacagtaattggcatggaggtctgaagctttattttatgatattaaatcattcttttctggaacagaaatctgcaaagtataccattcattatgctaaggcctgtattaacaagggctctggctgatggctggtgacatcttggagaacttatgtagcacatctcaagggaggtgtcagccctcacctgtggaggtgagcattagaaccaagagcagaatccaggattccatctgctgtgtttcagggacagaagtgtatggtttgtcattgtgagcttggtgcataaagggtaacattaccctaaaaatactcacaatgtggactgagatgaacttgattgctgtggcattattttagggggacttggcgctttctccatgtaatcttgtgaacattttttttttcatgtgaaccatgattttcttgaaacaaagaggattatcagtcataagttctgaagactgaaatggggtgggagaaaggtttagaaggagaagattttttaaaggacttgcaaagctggcactcaactctagctggagagaaattcttgagttgggcgccatcttggttttgttgctccagggcagtgagggaggggatgggagattttcaggtcctcagagtcctcatgtgttccataaaaatgggttcctgtagcccatagacagctactagagggagttaaggcctgctaggaaagccagtgagagttctctaaggctccaagttctaagggttgctcctctccagacagcttgggaactgcaagccactggaagtcactctgtggtcgcacagagctctgcttcgagtccagcagtctgtgttttgtgcggtctcactctaggctatgttcccaagtggagcaccatgatttcctgtgaagggtccatgagatagatctttggtgatgaggccagcttggagaaaatggcgcttgagaatttcttatgatgctattcaatgacagtgtgattcgtggcgtccccccagccctgtcccctgcccaacttaaccacacttggcaagatctctgaggagtcctgagaagaagagtcctcaggcaacagcaagactttcccaccctggtctaggaaaaaagttctggaaaagacaagaagtccatcagacacaaaagaagacatgtaaggggaatcaaaacaaacaaaaaagctatgaaaatgcagagactcaagaggtcgccaagcgaatgaaatgacttaaggagtgatatgtttgcttcatctttctggttgctctctgaatggtctctgataacacattttagctgtagaaatggggaaagggggcaaagacaaagttccgggaaggttgcaagagataactggttatctaactggtatcccgggggccagtgtggactcgcttctatgtctaaaaatgattttgttagtatgtaggtcacattactgtgctgtctggttattggacgttgcctcagataactgtttgtggagtattaaatggttctgctgcctcagcacactttttcactggtatttttcacacagttgtgcggctgaaaaggcgcactgctgcagcaaaaatcaatttatctttccctctgctacttgtgtgctgtgagttcttgtagtgttttaccatttgattaattgatattctttgtgtcggacatcatttgtaacactgctgtccaactttgggtgtcttaaaaactttcgtaagaacacattatttatgtgagacctcctcatgacaaagtacaatagtgagatgcagaaagaaaaattagatcgaaatgctcttggcttataagtttattaagggtggaacaatgtttccattcacgtctccctcctcccttctgcatccctgtcgcagggtgacttcgacggctttgctcgaaaagtttggtgatgaaagtttttccttccttggctttttctgggtggtggtcttttgggattagaggggcttctgattgcctttcagatgagaaaagtgggtggggaggggcagggacaagtgggaagggtaggcgtggcgtggaatgaatgcagaggctgccccatcagagtcctggggttcgagagctgggagcaggagagagctccttctccataggtctctcccagggccttgctagatggttttagtataacgtgtttgcatgcatttcacatggtgctggtctttccgtgggtattattaatatctatttttggagcaaagactgtgtcaaatgaaggtacgccagccccgcgttataaaaacagaacaatactgttgcttccccgtttcattataaagtttctttgaccctgtggtttattttcaaacattcaagttatttgttctggtgtattcttaaacaggggttgtttttctccctttcagaaaatgagcacagatggtgatggattcttcaagtgctgacatccctgcttgagaaaatgttcccaccttctttgtgccgaacaagtcaggcaaactaacatgatgatgcgatcatcggtttcatgcagacatgcagaattgattgacaggggaaaatttaacataaaccacacattctttcagtgccttcaatttcttaatgatgtttatttgttggatattagcagcggcaggaatttcatttaaggcgaaaagtggggagaaaggagaagacggagcaaggggagagaacttgttccaggcaagcaggtttaagaggaaatttactgctctggtagaatctccatcaaaacaatttgtaaccgctcctcggagccagcttggagctgaggctgtcagcggctaaccagccattctcagaccattgcttctgtttgcgtgactaaatacagacaattaacgccgagcactttcttctctatgaactcattgttatccagggttcaagtgctcggataatgggccacagggaccatgggctgtggcggagggctactttgtaaaacccattcctcattatctgatgtgagccctcctgggcgactcagggccccggctcccttgcccgtgggtttttgtaaggttggttcaggagatccatcgttccctgatgagcctggcctgacgcttggatcctgagggagcccttggtccctagggcctggaggtgacaggcgtggggaccttgtacagggcatggagagtgaccactggcgctgctcatgcctccagtgactgcctgcctctagaggggcctctctgtgcttcctggggctgtgtctgtctttcctaatgctctgggcagaggtggagggagatcaggagcccatctgtccctgagctcctgaccatggtggcccttcctactgaggactggttataagggccctgcaccccaaaaaggcaggtgcccttttgccacccctgtgtgcagttcagataaaaaacaatatgaagctgtagcattaagtgtggcgaagtagaagaaagttctgagatttaatattttctcccaaagcatcacattgtttcaaatattttttctcaactttgtggggcctgcactgctctggtgccctaggcaggtgcttagcctgctcactggataatctgcacctcatttactccccatatggtcttcgtgtatttccttttgccatatccataccctcctattatttgtttaatattttcattgaagcagctttacatcaacttctctctctctctctcttcccccacccccactctctcattccccagcctgatacctgcccaacttagttagcctagtcctaatgttgctgtgagatcatgggttgaaggtgctagttatgtttccctgagtcacattaaagtaaatgcaagtggactattaaaattttaaggctaagcgtggtggctcacacctgtattcccagtgctttgggaggccaaggcaggaggatcacttgaggccaggagttcgagaccagcctgggaaacatagtgagacctcatctctacgaaaagttaaaaaaaaattagttgaggtggtgtgcacctgtcagcccagctacttaggaggctgagatggaaggatcacttgagcccgggagttggaggctgcagtgagctctgatcgcaccactgcactttggccagggtgacagagcaagaccctgttgcaagaaaaacattaaattaaattaaatttgaatgagtgagtctcacttcccatcactggtgcccgtgccacggttttggacacctgggtacagtttgcacttgccattttgcaggtggagagaggcggtgcatgagagaagatgagcctttccaggatggcgaggtgcatgtgaccttaactgtggggagaagagaaggtctgtgggcaccccaggatgaacagagggggcggggatggaagggaagagggggacgcgccacaactttcccggagaaagcctgtctcagagagtggaatggtggtcctgcctcctccacttccttctctccaacccttgctggcccgagcgcacagagcttcccatgctcacatttggcttccaaagcaacttccaaaaacaagcttctgggattccttgcgatcttttttctagttaagtcagatcaatggagtttttgctaaagtgattatttttctttttgtattaaactagtttaaaatacaaataaaaatcataaaatttacaaagtattttctgtctttgaaagattcccacagtcacctgcatggggggaccaggtgtccagaacccatctgaaggagggtgtggaccacccccactgctcatggtcagagtggctccctcttgcttagggtgaaggatgtgtgctatgcagttgtataatagggtatggtcttcggactgtgcctcgggcggcctagtgggctgggatgtgcattgcacagagagccaggagcctgggttttcccacgaacgcctctgtgacctcaggcagcctccctcctttgctgggaccgtttcctcttttgcaaaatgggtacagtagcatttgctctggccctttgcagggcagggcctgcttcagtccccagacatcatgatggccacacttcccatacttctctccttcctatcaaagtgaaaggccagggacttccagatcccgctggggtgagcctcagagcagacatgccaggcatcatccctgggtctctgtgatggcttagcgaggtgacaaggccgtggcagacacagagcccggggcactcacaaggatcttgccttagcaggtgacacagtctctgcagcccgaggcttggacagagcctgggctgcccagatagcggggtggaggtttgcttgcaggtagctccctgtccaggcgccttgtacagtgagctttcgggtcaaacctttcctgacacagctggccctgcctgggccttctgctggtgccaaataaccttaagtggtaagaacccctagaaaatctactagtggtggctgacttctgcttaggtcccctgccttgtctcctccccactgtgtcagtcagagcaggttgatctcagcctggccacacacagccctgtttcccaggggtcctggggaagcccacccactccgcactctccacagggagcccattctctgagcaaaaccccaagctctgctacctgccaccccctgcaactctcaccctcaccccatgacctccaaagcctcccagggccagagatccctgtccaaggtggggcttgaaaggactgggcaggagggagagcctcacagcctgctgtccccacactgcccaccccgactgtggtttccagcatccctgagaagcccaggccaagagtggcctctgggggtcctcagttcagtgtggcatcctgagtacaggtgggttccccgttaaggaaaagtggtgtatgaaatttgagtctcccaacctgaaggccttctcatgggaccagaggaagaccctggaagcctgggctccgagaatagatggccctgtccctcgctccgcactatgcggacttcagagtaaagaatagaggttaggccataacacagatgtaaggaagttcatcaaagtcctgctgcctcccatggcaactactccaacgctcctttgggactgtcaactccagctcttattcccaatgtactcagctttgaggtggccctgcatggctggtgtgctaagcaaatgcttgctttgcttattggaggcccctgctgtctcctggggctgcaaattggcagagggctctgctcacctgctgtgcagagaacattagagtgaagggcctgggggccccggggacccctctggggcagggcagcagtcctgagctgcaggtgcaccatggtgtccctgggaatggagtctcgagcggggcggtgcgggctggactatcattcgtgcaggctgtggtgtagacagggctcctgcaggttatgccttctggggccctggttccgagactctgcccctcgtcgagacagctcctttgtgagttagctgcagctctcaggtgcccttggtacctgctgccaggtgccacacatctcgagggtccacttatcaggtctcagctctgctgtcctccacccttgtggctgccctcatagagaaaagagccacaccgtgttcccagagccttgtaggcgcagcaccagctcccaggatctgggaggcagagctcagctgttggactcatgttgtcagggttatctttgcactttgacctaagtagctttccctgtgggcctgtgctctgatcccggctcgctggggaggtcccttctctccctcactccaggggcctgggcaaggtgttgggtaggtggtccagggctcttattggtctgataggaggaatgtgcctgtggcaatgagcaagaggcaggctaaggtgggtgatcgcacccaacccctcccctttctctgggtggagctatttgtttgcttgtctacacaggtggttcctgagctcctgcagggtacccagccccgatcccccacccactggccccactctccctgctggctctctacctgcaggccttggcctaaatggcatgtctcagcgaggcctttgtggcccaccgggtcctcctccccaccacgcctactagtttctcttccatgcttctctccccttggcacttctgcttattcttcttatttcactgttttcttctgtcccagattatcagctccttgagggcaggaatctcatgccttttgttctctgctgtattttcagcacctagaagcttgctcagcacataataggtgctcaacaaatatgcattgatggggagaatgaagaggcatggtccttctcttgtgaagtgtactgtccaatgtgagtcacacttaaggagtaagggatgggtcataacagtttatagggcatagtgaaaggagttattgagagtagggaggcgaaggcttcctggaggaggcagtcagggaagacttcctggaggaggtggcctggaaaattgagtcagagttttatatgcagaggtaagaaaaggaaggaaggatgatggtggggcatgagccacccccctctgggccctctgtagcagggtctggtttgagaaggtcaacaggggcccgataggaaggtcctgagtccagtgaaggatccttgtcttggtactggaggaggaggggcagcctgaagggtttcgtgtttcagtgtagttgatttcactgaattacgaaagttctgtgggttcactattaagattcaaacaacacagatttctgtaacgtgaaatctaaaagacccctttcaactctacttccaaatccttctcccatcgatggagaaaattcctataatgcattttggtttggtaaacagcacctgctggactggtgtatatatacatcatgtgtagggtgaatattcacaaaaagaaaatcatgcatatgtattttacataaaattgacattgaagcctacataatgagatcttactatacatattgtcctgagacttactttttttaaaaaaaacagtattgtttttagatcaaaacatcagatacataggaggtgcacacattttttaacttctgtgtaattctgtgtggtatggcatattcatattcatgtacccatatgttggatatgagggaggtttccattttcttttcgacattacgcttaaaatgctgcagtaaacactgtatcacggtaaacaagtttgggtatttctgtaggatagattcctagaagtagcattgcagaatcagtaggtatatattctaattctttaatagacgccaccaaatttccttccaagtaatgttgtttgtgtacattgtatacatgtctaccaatattgtatgcatagtacttacctgccaaaacctcaccaatactgaatgttattgctcctttaaatgtttgccagtatgaaggaggaaggctggtatcatctacttgtatgtccctcattcagagtacaactagctatcttttcatatctgtattgcccactctaatgacttctataaattgcttgttaatatgttttcctatttttctattttttaaattgattttcaagagctctttacatatgttggacattacccctttgttatacatattttaaacatttttggggggctgctgtagagcaagggaaggacataatcagggaaggcttagaaagactgctcaggatggatagggtaggggagggttggctacaaagacgaggtaccaggcagtagtctgggcatgagagggtgaggcctcatcctgttacattacagagcatttgctttgctcttcattccatgggtgccattccaggtgtgtgctgaagacttttgggaaggtcttcaacaggtggtttctggggccacctgagggctggtacataaagcctacatgatttgcctttcctggcctgtgcaggccgtggaatcccgtgctgagcctggtccaggtgggatgctaagatacccgccctgccgtggcatgtagcataaagccctgtgaagcctggctgtggaccctgaggagcctagggacatggggagggggacacagcttgcaggacagcagagtatgggcactcaggtcaaagcgtgggcttggcaaggcctccctttgctcctgatagagagggggttagccctcattattcttaaggtgcccaaagctctgatagcctgtagttcaataacttaaaattgaaaatgtaggttaaaatactgttataaacacctacagccaccccacagtgaagacagccactacaccttgaacccagccctgtctggggtcctagctcccctctcccagaagacaggtgtaattatgctgtttttccacaagaaactgaggggcagggggcttactgtcttgtctgaggttacccagctgggtcctgtcagagcagggacatattcttagccacccatgatctcaagccaccccccaggcattaggagagccccttgcaggtgcctctgagttcagggcagacacatggtaggtgacatgtctctttaggtcttgcacctacaccctggttttacacctgttcccagatgtggagatggcctggctggaagtccagcggcccgaggagtgggtgcctctgttttctcaccccatccttccaggggtctgtgctccagaaggcgtaggccatgtgcgtttgaacccagccctcacggaggttgctggcaatgtgtcttgggcagaccatttgcgcctggctgctggagcggggctgggcattccttctggagggggagatgagtttcaatgacctctgaccattgtctttggagggtttaccttgtaatggagtgttgagtcaacattcagaattaagagcagaaaggtaacattttaaggcatttcatcaattcttctgagacgcccacacatcttgttttccctcttcaccacttaggcagcaatttcttttcttgtttctaacagctacctatagaaaacacttgaatgcagatcatatcttgatggtatttactaatataaatatttgctttctagaagcaatgttacgcaaaatgcctacgctgcaggctaagcgaccgagtgcttgaggtaagaaatgccacctctgtggactggagttggtgtctagccgtctccacagtggcacgcaggatactggcagaacggccaagtgtcggcacatccggcctgccctttccaaggtccttgtgatcacattttttaaaatgataaaaccatcttggccagtttcccccaggaccccttgagctgatggagccctctcccaacactgcatgaggttcagttgcatatttgcccagaactgtgctgtgcccagaactgtgtatgacagccttcaaggagcttacaatgcatgaagatggggtgatatcaaacctcatatcagttacatttatatttaactggtgtaatatccaagaacaaggaaggaaccgggcaaaccacacgtaggtctgaaaagagccaatgaaatgatgcagaccaaggctagggcgggcagatgcctttgcaatggaattagagtagttttaaatatgggctaatttcaagcaattttaaatatcacaagattccactagagcgaaagactgcagagaggccttggagtttgagaaaacagggtttgctgagcttcagtctttgtatccacctctgactctgtgtgcaggctacagcatggggcattgggctaacaagaggcacattaggtgtgtgtgtgtgcgcatgagtctgtgcatacacgtgtgtttgcatgtgtgtgcatggcgcacatgtgtgcgcttgcatgtatatgtctctcttctcttagggtgaggatctgtagaaaattcactgcaatgtacccgcagccctgggtcgtcgtgtcctgttctctgtgggccagtaagcttctcttctaaggtcagctttcttcacccagggccactccattttcagatagactggatttggagagtgcctttggggcagtttgctcccttcttttatatttgatattattacagtttttgtaacccaaatggcattggttttaacaaataaacaaatgctaactgccaacttctttggctggatggacatgaatcggctttagcaagtgaatagatgacatatcaaagaatatgttgactaatcccttccctgtctgagagcgttttccagatcgtagacaaatacactgcaggcatttaaaatagaagtccgggcatggccacaagtgtattctgggagttacagggtccgcacgctctacgcaggtgagtatttctaggagatgccgggaagttggggacacccggaggcaccctccgatgttcagatgatcgtggcaggaacatgctggaatgatattctgcctttatttattatttgctaccaatgtgactatcttttaatttttttaaaacaaataatttagtcgtaaaggctcagactgatgttttttttttgcgaaatagttctagtgagctaatttatttttcaactttaaaacatcagcattttatagatctgaatttcacaatgtgaggatgattgctacgtacaatttgcaaaattgtgattagccagcccttgctttgagttagttctccctaattcacaaaggcttccaagaatagtctgcacaaaattcagtttgcaaattgcagggcagatttttagagggcagtttaaagaatgaagtcctaagggttttatctatatttatatctcttgttaaaccaaactcttatgtaaatgttacaatctgtaaataactagcagggctgccttcttaaaggcaagattgcatctccatttttgagatttagcaaaattattaaatggcagaattgactaagatgcaagtatatttggaacgagctaataaacattaatcaatatcatcagctgtatttgtgtagctatttcagggtttaaaagtaaaggtttttgttgaatttctcataaattaaaacaattaaaatataaaagtcattacccttagtgatgttttggggaaaaaaatggagatagctttgtgtgctcttactttttatagccattaatgtttcagtaaaccttgcatgactgtatgcaatttagattattttttcatccttttgccattggacaggaaggaaattactggctcccatcagtgttactggcaatccccatgttctgacatctgttcctctctaaacattttaccaaccttgatgaaatgtagtttggtgtcagaagctgacttgaagaaaaaaatcacatgattaaaaaaaacattgattaaacaccagaagtcacttcccaataactgtcaatattttgatggtcactgtcatttatttttttcttaaatcctgataaatcgtatagaaatgttaatcatgtttaatatttgaattaaactgaattaatggcatgtcatttttaaatagaagtgtagtggattcattctagtccattttaatcagggtctttgggctacgattcatcaggaatgttttcagtctttctcagagaaaccatgtaacgcactttctttgagcaaattagacttcctcaattctttgtcctctttatctcctggttttcagggaaaaacacacagcatcttgggggtcaggacctgccagaatgaggaactggggtggagcagaggggcaaggggttctctgggctggatgtccacgcagcccacggagcccccgtcagagagccctctgggaggccttgcagatggaacggtgtggagcgtacgtggtatttgggaagtttgggcccagggaagggtaaaacgctcccctccccgacctggattatccaaacgatttccagatttattttctccgtgaaacgccatttggagctctcctcttcttggctcccgggagaatcagggccttaaattcagtgtgtaagcaggagaaggcccactgtgcgccggacgtgtcacaaaaacagaggcacattccacagaggcatatttcaatccattaacccacagaatacgtattgaatggttagtgtgtgtcatgctttgggagtgcagcgacaaacacacagaaataaccttgtcctcctgcgcctctattccagtgacacagaaaaatgcatctcaccatctccgtcccttgggcgtggggccccctcgcaggctctggctccagggtcaggtgtggtttcaggaaatcagctccagctgtgtgacgctgcaaccccgacctcccagccctctcttctgcaaatccacctgccccaggctcatctccttttctctgcaaactcttctctgaactctgagaaaacttggctctggccctacaactgccctcaccatgctcatagtttaaaatggtagaaaggggccggtgcgatggctcacgcctgtaatcccagcactttaggcggccgaggtgggaggatcacttgaagtcaggagtttgagaccagcctggccatcacgttgaaaccccgtctctactgaaaatatgaaaaattagccaggcatggtgacatgtgcctgtagtcccagctactcaggggactgaggcaggagagtcacttgagcctgggaggtggaggttgcagtgggccgagaccacgccactgcacgccagcctggatgacagagcgagactctgtcttaaaaaaataaataaataaaatgataaaagaaatcttcattcggtaccacaaatttagaaaacagatgcatgggaatcaaagtgcccttaattacccctgttccaacacaaaccagatgctaacctctaggtaaacttccttttcatcttcctcttttttttttttaattagtctacctggctaatttaatttttgttttcttttttcttttttttctttctttcttttttttttttctgagacagagtctcattctgctggccaggccagaatgcagtggtgcaatctcagctcacagcaacctccgcctccaaggttcaatcaattctccgcctcagcttcttgagtaactggaattataggcgtgcaccaccatgcccggctaatttttgtattttcattagagacaaggtttcaccagttggccaggcaggtctcgaactcctgatctcgtgatccgcctgccttggcctcccaaagtgctgggattacaggcgtgagccaccatgtctggcctcatcttcccttgttcatccacatttttccatatatataatcagaaaaattgtaccactagctttcagtcttttcctcaggcatcacgtgatttgtattttgccaaattcccattgagtttgggaccatcatttgtaatagctgccgtttttcattgaatagatgtgccataatttatatcataattcttttattattggctttgagttatttccagtagtttttctatataaaaaaatactatgatgatcatctttgtatgaagaagacaatttttccccctcattttgggtgatttccttaagccagatgcccacaggggaaattcctggctcagaggactccactgtgcttgtccatcctgcttcacaaacccatctctgtttctgcgggacttggtcctgtcgccctaaggactctgcaggcgccttcttgggagggctgcgtgtgttacatgcttgcttctggggtccctttaaatcctgcccccctggccaggcccacaggaagccagcccagtcttcctaaggaaccatccttttcccgaatttcccttcctattccatctcatcaatgctttgtagctgaaacaatgcatgttttggagctcacagtaagtttctggaacttcccattgcccatcacctgggctggccatgaactcttcatgagccctccattcacagccctcctgcccaccgagccccttactctcactcctagtgggggcctcagatggcctgcggtcctgcctcatggagaccactctggcctggcgcttcccacctcatgtgacttcctggattcctcctggaaaggctgggcacctaatgggagagatttgctgaggctcaaagcatgatagttccttaggggaagcacaccatgttggcagaggtactgggtcagatgtcttgccatcccattgactggaagacccagtcctgagaagcaaagccaagaccctggggccctggaggctcccacaccttcctgagcccaggactaagactccatgattttcctaataaaccagatcactccccagggccagggagcttctaaaggggcctcctggccttcccacctgggctgggctttgctggtagaatccaaacctccaatgcctgctgaacgtgaaggcaaactctcggctccactcagctcagtgtggcagaaacgaaatgcctccttttcccctagccctttatcccttcctttcttactttcctgtatcccccacattgactaccctttctcctcgggcacttaacaccagtccagcgacatctcctacctcccgtttgctcctgggtctttcttgaatttttaattcacccacaatcaataattttattcttttaaagaaattacagaatatttctaagtgtatgcagggagaggggaaaagcacagtgtgtgtcagtttagacttgatgtattctggatttagaagtgctgaataattcattcctgtttaaaaaataaacatactatctctatcagaacttgactggggttgcttcatgatgaatcagatccagggctgcagggttcttgggttgggcagcatgggaaagaaggcaggtgctgtctagaggaagccatcctccttctcatggttgggatgtccagatggtctgggccatgattagaggtggcattgctggttcttggagatttcaccttccctttgagagtttctatccctctgctagtgctcagttttgcaacctatccatcctaccattattctactcacttctttctctatttgtcctgctcctctgctcaaccactcctgtcttcccctcagtcaacctgaccatccctctttcccattttctctccctccatccatctgtccatcccttttcacctttatttactcatccactcaatcaactacccccttattcacctgtactcacccatcatcccatccatccatccacccacccatcctccatccatctatccatgtatctacttattcatcatcatccatcatctattcatccatctatcatccatcatcatccatctgtccatccatctacccatgcatcatccatccatccatccacccatccattcatcatcatccattatctattcatccaatctatcatatatccatcatcatctgtctagccatccatccacccatccatccatcccatccatcatccatcaatcatccatcatcaatttttttatccttccacacatccatctatctatccatccattgtgttttgggaatctgcatggtgcaaagttccacactccagagtgtcttccctggtattctttcttttttatttcaggtaggatctcgctctgttgcccaggctggagtgcactggcactatcatggctctctgcagtcttgacctcccaggctcagacagtcctcccacttcagcttccccagtagctgagaccacaggcacatgccgccatgcctggttagttttaattttttaaaatttttttgtagagacggggtctcactacattaatcaggctggtcttgaactcctgggctcaagtaatcctcttaccttggtctcccaaagtgttgggattacaggcatgagccactccgtctgactttccttgtgttctaatgagagattcagacaaggagatcaccaacaatgatacaaggtggccatttttaatttacttcactatgccctcatccctaccccatgaagtcagagccgatctcccctgatatttatatacatcatgtctccttaaaagcccctctcttcttccagtccttcctgaagactgctgagctggctctccctagggcactagtggcgaacaacagtcctgtgtgacaccttctaaaccgtttgttgtacctagggaaaggaggcccagggaagaaagcaccctcacccaaagtcatacaatgggtgtgagtgctcttgttctagaaccatccacgtttgctccttggcctggggagccttgcagagacacctgttctggagtcaggttcatgtcttcctcatgcccagggaggaatgatagccaggctggaaagggctttgtggaggggttggtgtcaagtgcacagacgcccgtctaggtcctccgcactttgccttctgggggctccagcaccaggctgcaactgagggacagaagatggctctagttagaggcgatttgcctgtgactctcacccccacccttggggccagttctccccctcagcctggaagcctcagtggcatgtcggatctgggaggcaaggcagccggtgtggtggctgcaacccagggctgcaagtcagcaggccatcatcaagctgctcccttttggtggtgggcttctctgagcccagtttcttcacatgtaaatggaaaatggggtgctcacatgtgttttgtcagtgtctgggggctgttttggggctccagtgacagcctgtgcatggagagctgtgaaaggctgagggcagcggagagggcccttccctgaggctcaagtctggttcctcagactctgaagtttcttgcatctgtccttttgccacagagcacttaggggtggctgaggggagcacagaaccttagatatgccaagtctggcattgcgcatggtgtccaatctgtggaccatgaccccagtgaaagtgtggccctgacaccaaatcctggcacaaaatcaacccagatgtcactgctgagtacctccagatgtgcccactgttggagcaagctgcaccttggtcacaggcactgggctgcccggctgtgccacctatcctccatgtggctgtgggggtgtcgcctctcctctaactgtgacgggaggggctgcctctctactgtggagcccctcccacacccgcagatgtgcatcacataccttgtctcctctctgctaaatcacaaacagaaattgaacttggggtcatgcatgaagtcatgagtgtaagtttattttctacatgtggagtgttctttatttacagtcaaaatcccctgaagattaaactttaaaaagatttaatagtgctggggtcagatggtaacccttgctgtgctccaggcaagcaggcagaactcagaaatagcaaccactttgaagaggcttggcaaagagggccgtccccattgccagggacatgtcccagtggtcagcccgggcttggcgtcgctctgccaatgctgttgggggaggcctgggatccttgggagtctgccccacggggcgaagaggggaacagtgggctcagaaagtctggcatccagagcagtgcagggagaaaagggtgcgggagacagggtgctaatttggggctgagtgtcctgtcgaagccagagctctttaaacagcaatgtcctctttttgttcgtggtagggaacaagtgtcctccaggcagccggacaagtcactttggctttttctagagaatcctcttaaagttggtcactgacaactttctgaggagagggccaggggatggtgactgcccccgacgcataggtgggtgtggaggaaatgaaaacgtatgtgaagcgcccagcacagtgtgaagctttcagtgtgtgagacggctttcgatgcgggaggcacgaatgtgcctccccatctctggcacaaagaagagaaggatttgctgtacaaatggccctggaaagacacgcgatgatttttttttaactgggagattttttttataaaaagctttttttttttttttttttttttttttgttttctagttgggcgcagtagcccatgcctgtaatcccagtgttttgggaggctgaggcgggaggatcacttgagcccaggagtttgagaccagtctgggcaacatagggagacaccatctctacaaaaaattaaaaagtaaccaggtataatggcacacacctatagtcccagctactcaggcgcggtcttattgatttgggtgttgttgcttcagcccagcaataactggaggctgcagtgagccttgattgcaccactgcactccagtctgggcaacagagaaaaaccctgcctctaaaaataaataagttaattcattaataaaaataaaaagccttttttcccccttatgcaatttaatctcctgtttgcttacagccttttgttaaaggacacagcattgttgaaattaatccaggaggagtgcatatttcctcgggcttggggttcagacctcgggctcagggccccagaatttacaccagctttgaatgactgaggtctgactgaaccctgccccatccagagaggtccatcccatcccggacttcctctgagaatccaggctcttctctgtgaacagttattttatgaggaaagtggggtgttttctaggcctgtgtttgattttcacttataattatctccacataagacttcaattttggattttgaattggagacacatgaacccagctttgcatgttgaaagatcagtgacaaaagtcacatgacatttgcatgccgtaattgttcctgcgaacccttcagcaggctttgtttggaagttctggaaacctgcatgaagcagccatgcacccttcatttgggaggtgtctttcatgcatttagcttgggtttgggtttctgtgttcacatctcagtccttccaagtgaaggaagctctttttcagttcttctcagatcacactcttggatctcctaagaccctggtgttcatccctctcacctctgcggcctgagctgtggaattgttatcctttgggcaatgtctttgtcctctgatgagtggagttaggaacgatgatgacttttaaggttggagaacggggttatattacccagtcagtagaatgagcaggcgggatcagcctgggctcctggagccaccattactagtggggacaggtcagactctgtgcccgtttcctcttctctcagatagggtggaacctgctttgtaaggtgggtgtggatgaaatgaaataattcacatcaaatgcttggcagagggcagaaaccctcgattcacaactctgatgatgatcatgactctcatattggtttatcaatgaacatgtgaacatgaaggtgccttgtgtgtgttcagctctgcagaactccccaggggaggtggggaggcattgcccagctccagtgaccatgatggctgaagaagtgagcagagaaagacttgggcctccaggagctccttgagaaataaaccgagacttcggtggaggccacacttggccacagctacccaagggcaactttgattctcattcgagctcatgtccctatcacagcaaaagctctgcagcccctgacaaggcagaagaggaactcatgggcctctgtgtaacctgctcttggggctctctgctgcccttgatcttcactcagaactccatggttctccatcatggccagaggggaagacttggctcttaataattgcgtattcaataaatggtgatgcattgttctggctgtccacgtagccctaactaatcactcaagttccattggaatcattttgtaatgcaaatagttatttgtaccacttgtgtgtttcagaaatgaaggtctgatgtgatgattccaccctataggagggagagatttgctggacccaatatccacatggctctctctggaaagatcgtggcatgttcatagatgtgaattggggttccttttggattttcctgctgatcttgaagctggcgttgccaggggcttggtgtacttggacctagtttggtggcttttagacattagagaccatcaagaggtacttagaaatattggctgctttcattttgttctcgatttctctctctcacttttctactcctccctttccccctgcaacaatagaattttgcggcatcatcagagtgagagatgggaattagcactgtagagagggataccctcatgcaagggagctctgttgggttttgttcaaacggatcttctttgaggggttgctttgcaaatgtcggtgtgtcaagaaggccaacagctatctaagagaggcctcttagccctcaagagtccctctcgggctctcagtagacaaacacctgtcctaagccacctctgagaacatgggccacacaacagcaagtgaacagaacagagcctttattgagacaggtccgaaaggactggagcaatcagcttacagggaacatttttgcttcgtaggaatgcggtcctgcttgctgaaaacatatcctttgtacagagaacacacataatcctaggtcaactttgccctttgaagaaaaatatgctcagctggaattttggaggtggggggctggggaatgggaggtggggaggaatctattctacagaatatctgttctacagaatatctgcttagagctagaaccttcaaaggagttaagtttttggagttctgttctataaagtgtgtgggatcaaccaatacaatgcaacagccatgaaagtgatgatgaaattttatttaagagaacatctaaattatgtttaaagttcttgttggaactatcttttgcaaagatagttccagaccttggaaagcccaggcgtgatacagacaaaagtttatcaggcccctctccctctctgcacccagctgtactatttggtggtgctatgtgttcttaaggtcatgtcaatatttccattaaaacacacatttttaaaatggagatttattactctgacaggatagtttgctctggggcataagttaacttactgggtctacacttggtggggggatactttctctaccaaatttctgaggaaaaatcagaattgatttgggaattattgtactgtgctacttgattttcaaaaaatatccattgagcagaatggactaaaatattgcaaagtaatatggtttaggtgataatttataatcttatgatttaaatgagatgctgtatttgaaagcacttattttcatgcctggtatacagtaggcattcaataaatactactttggtcctatgattactactatgattactcccgtcaccaccaccaccactactaatttctttgagttgggttaatatggagtaatagatcacatactttattcatcagaaagctgggaggcgccaggtgcccacatgttaaatattaactgtgctaaattcgatcatgtagaagtttgtggccaatagtattatattaaaataaatttggtactgtaagcaacttggacaaaagttgtggaaccgaggcagaaactcactcttgagtggtcagtttcttgcacactgggttatgtgtcactggcattttagggcattttcactttacatctgcctttgtttggtgagaaactttgcagttttctgggctgcagggggcattggagggactgagaggacactcgactttggagctggggatggggaggcctcgttacaagccttgctttgctaccagtggatttagaaaaggttacattgccactctgggcctcaggctcccatttctaggaggtaaagtagtctatggctgtcttactctgacgtttgggctctcccaggccatatctgtgaagcaacagctggtggtctggcttcactgaccctcctgctctcaagacatggccattgtagacatgtactcattcgggatcagaaaggaatggaagcaggtggccagggaacttcgaggcattgaagtggagtccatttttcggtcctgagggctcctagcctgagaaagcttgacctgtgggtcagtgaagcccttgcttgagccagcagagagttaggacctctgattctcaaaacataacttcactgctccgctcacacaattgcagtcaaggaattgaggactagaggtttcagtccctactgcacttccagcaatggactgggaaaatcaggctcaagtcattgatactggtaaataaaagggccttatttcacctgtaatcccagcaatttgggaggtcaaggcaggaggatcgcttgaggccaggagttcaaggtcagtctgggcaacatagcaaaacctcatctctacaaaaaatttaaaaaatttagccaggcatggtggcatacacctggggtctcagctgcttgggaggctgaggcaggaggattgcttgagcccaggagtttgagactgcagtgagctatgatcacaccactgcactccacactccagcctggggaacagagtaagaccctgtatcttaaaaaaaaaaaaaaaaaaaaaaaaaaaaagaatattatttgtctttatgacagatgaccatttcttactagataattactgaatactataaatcttagatctcttctgtctctgcagtggtcatgctgattccccatcagatttgtttgccaagtgacttgaggagatctcttgtaaggaggtcaccaatgtccttgattctggtgtcaccgtctcctgaggtgtgtgttcactccgagtttctgcaggtctgttggccagtgacattgaccaagaatgtcaaggtcatgcatccaacaggctggactttgcttccttgaccttctcagctcagtaacttttcttccacttgaccttagccatccatttcagatccacacccaggcttgacagtgaccaacacctgagctcctctgaaatctggtcttcacccatcctatgatgagtccatcactgcctttccctccaaatcactgtttgtgatgcctccactgtcaatcattggtgtgctcacccagggacccttcagcttcctccctgtcccctgcaggggaccttgtcttcccgctgcccttcacccagtggggagatcatggtccatcattttcatcacttccttgcacccattatcagctcttagctctgtggcatgttttctttttgtctcatgcacctgatgaatcttcagtcccgggtgaactcagatatctcccttttccatgccagttccttgcaccccagctctccaggagaaaaccatgcagctgagctgataggtgtcactcagaatccatggccacgggcatcaaatgggccctcagcatgccatgtgccaactgcatctctcctgggcttgcttttcaaattggccacactggcttttctcctctttgccccccggcctcagctactgatctcatctccattaaaatgcagaagtcttgtaggatcttcctcactctccctccaccaatctgccacttttctggcccttgtcttctcttctctgacctgctcttcccagagatcctcacctctggggccccagtggccccagcctttgtctccttcttggagaggtggttccctgggagcatgcacctggcacccttatgtatgcacccaggcaccctcagtgggcgtccaggcatcctctctgcccatgcgtgtcctcctgctcctccgtcagaactgcccttccctccatcctttgcagctggcttgttctcctctgccaggccctgtctcaaatatcccctcctcagaaagccgttgttccacctccctatataaaatcagacttccccagttgctggctggatctcaccctgcttactcacttcatcataacctgtaattatccaaattatttaactacttcttgtctttcccttcccttgaacttaaagcctatgtgggaaagggccaaacctaccttgctccttgctgtgacctagcacccagtacgatgcctgattcataaaaagcactttataaatttctgctgccctggtgtggtgcctcatgcctgtaatcccagcactttggaaggccaagatgggaggattacttgagcccaggagctctagaccagcttgggcaatatggtgaaacccatgtctctacaaaaaatacaaaaattagtcaggcatggtggcatgcacctgtggtcccagctactcgggaggctgaggcgggaggatagcttgagcccagggggtcgaggctgtagtgagcttcctgcatgccttcctggtagaaatcctagggcagcgtcccattttcgaccttctgccattgcccatggcagatcacgtcactgcactccagcctgcatgatggagtgagaccctgtcttcaacaaataaattaataagtaagtaagtaaataaataaataaataaggaaataatatttgctgaaagagagcacagttccatgaccatgaggccctggtagagggacctcttctgtggccacagtcccagcttcatctctgaaggactgtggatcccagacacagagacgtccgggagttgcaagggagcaccacctgattctgtcctctctgtccctcttgagaagtgtcgcccatgcttctgccatgaggcgagctgggtggagaatgaatgcccacactgaacattcaggtgggttgtggtttctgagagctacgtggccatgaggccgctggtcaagagattcctcctcttcatcttcaccttcctgcctgcggctgtctttgtctggggcttcctgcaggccttcctggtagaaatctgcttgctgctgctggcctgcctgaggcccagggcagtgtcccagtgtctaccttctgccattgcccatcagtagcttccacctggcctgacctcactcacaccttgagccctacctgcaaaaagtgaccttggactgtgacctaggaacacccgtgcaccagccggaccccacggagactaaccaaagacaaaccaccccacaaattagtgggctgtgcctgtgttgacacatctattctcgccctaatgatatgtttatttaactgatgactgctgtcctcattaggggctcattgttgagcccggaatagtgattatttttgctgatattccttttctgcaaagatgatttttttaaaaaatcactcttttggtgtgctatgaatccttaatgaggatagttaaatttaaaagaaacccccaaaccacccttcaggttgaaaatagaagtgtctgcaaaagcaagctgctaatttgctgattattgattgacatgattggtgacagacccaaaactttcaataaaatgaaagctcccatcactggagcatggtagcaaaaagaaacagaagcagtttcgccaatgggaaatgagtgcttggggttctagaacattctctttcctgcatgtagaaagagtcatgattctggaagtttgaatgttggtaatggcctccaaattggacccaaagctatgcgattcttggggatggatggagaaagatgtttgtaaaagcttattagctgaatactcagagtcaattaatgaacttaccaacccctgaaactcatctttctcctttagaattctaatcgaattcctgtgtggcaggtgagtattaacctcctgcttctcagacaaggagagtaagaccccaagaaacagaatcttggctaagattggggctagggttggtattaggacgtctggttaagacaaacgttttctccacccatcgctgggagcccacattttccctccatgacacaatttgaagactggttctacaaatactggcccgttcccctttacttgaatatatccaaatacataaggactgtgatcatgctgtgaggagtatgacacggtgggttgatcatggagatgttattcatgatgaaaattctatggcctcagctcaatgcccagcctttacagcagtttccaaccattttggcaccggggatctgtttcatggaaaacaattttttcatggatggagtggatggatggtttcaggatgaaactgttccacctcagatcgtcaagcattagattctcataaggagcacacaacctagatcccttgcatgcgcagttcacaagggggtctgggctcctgtgagaatctaatggccctgctgatctggcaggagatggggctcaggcgggaatgctcgctcactctctgctcacctcctgctctgcggcccagttcctaacaagacacggactgtcagtggactgagggttgggggcccctgctttaaagatctccgtacagcatctggggctggcggaacagggatggggacacagaggagtcacgcaggaggcagacgtggccagagcatggaggatttggcaccagccaggaaggaacaagcctgagagcctggctgtgtatcgctcccaccctgccacctatgaacagtgtgaccttgggagagccatttaacctctcggaaccttagtttcctcacctctgtaatagggctgttggggcatcaaataaaataaccgtgcatatgagaggctcggttacatctttaatctcgatgatggaagctgctgccactgccaccacagccacccccagcctggtacacatcccatcctgtctcacgagcatgtcatctccttttcccacgtggtctgtgtgttttgggaggcctggcacgcccacccctcttcccagcagagcccagcattgcaccagacacgtgttcagcaggtgctgagctacgcggtgggtgtctggtctcctgaactgacccagtcccggcccctttcccagtgcctggcacatctcctccctggcacatcttagctcctgctctctagggctgtcccttctcttctcagccaacccgggtggagaagctgcgagtgccacttcctccatagctccctgatctgcccttgtgcacggatagaatcttcctcgccagggctgccctcagatcctagccttgaaactatttctacttgttcatgagccacctggactgggtccccttcagctgctgcaactcacagctcaatactgggctgtccaggagccaccaagaaccagcaggtggatgggaggtggtcaaggagtggccctggctcagatgaccatccccactgaatggattcctcctaaatgaatagtaacctcccattcctcagatgtgagaccccaagaagcagcatcttggcaaagactggggtgagggtgtgatatcaggacctcaggttaaattcggttcagttctagagggagagctacaggtaaacaagggaggaggtgaccccgcccaggctggtcagtgcctactgagcgcagactgtatgtcctatgctggtttaggttccagcatgagagtaaggcagaacctgcttgatcacgggggacttgagtccagctggaaagatctattacatatttactggtgtcttcatcattggttccttctagaagttgccctccaggaaggcagaaaccatgtctgatggctcacttttgtttctccagcgcctggcacatagtaggtgctcagtgaacatgtgccgaatgagcggatgaatgaacaggacacctccacgtggaatgcaaatgctgttggacaggacaaggggaaggacagcgcagggcagcacaccatgccttgccagagggattgcataaacaattgctatagaagcttacaggctggcggaggtcccttcaggcttgggctgttgaaggcttattaggagagagtgtgctcaaactgatctttgaatcctggctggcacttggaggcagagaggacagagaaaagcatgcctggaaggtaggtgagatgggccaaggtgtgcaggtaggaccagagagggaaggtgtgtctgggggcaggagggagggtacatgcctggaaagcattggagaacatctcggagaggtcagtacaggccagaatgcataggcccaggctgcagagttcagctgtgacccctgatgttattttaaggtggtggttttttcatattcaattatgaatgaaattgcatttgaggatggcagctgatgatggcgtgtggttatgctgtgtgggctgctttcaaaatagctcaccccaaacttcattagtgattagttcgaggaaagtgcagcctgacccactggcaatttttgtatcatctgggttgggtctcagccgtgagaactcaggaaaaggcagctggtggctttgcaggtctcctgcaacatgggctatctcttgcaggtcttgttcttgggaggcctgttccttcttggtggtggtcagattgttactcctttctgattctcctttaccccggagttagtcactttcctactactcaaacttggatcaccctcaagggagactgatggaaacccctgctgaggctctcagggctaggaaagccaaggctggcactggacgctcccagcccggctgcctggcccacagagtggggttgctgagcagatggctggcgtccgcaatctcccaacttctgctaaatatggtcagtgtttgtagtagctcccaccaccgtctgtgtccgcatgaactgtagattttagcttggccacccctttagtcaggcctttcctggccaccttccctttgccgaacttaggataaaccctcattataatcgagattagccttagtgagaagaacacatgggttggcaacaatgacaaagcccaagcagcctccctgtactttcctgggcaccacaaaccagtgccagtcccgtttcctctatggaaagcccactcctgatactagctgatgagacagctcacagcccatggtgggtccctagatgaggccttccttatctccctcacaggggccagagacatggctattaaatggggatgcttggggttgcttaaggctctgctggtactaactgaccttcagtaaattgcataacctttctgagcctcagtttcctagtgtctgtatagtgaggataaagcgaatagcagaaatgaaatgtaataacgcatggaagttgaagaacttaacacggctctgggctcctagcaagagctcagtaagtgttaactgtactcctcaataagtgatgatggtggtgatgatgatgatgatgacaatggtgatgataatgttgatatgatgataatggtgatcgtgatggtgatgattgtgattatgatgatgatgatgatggtgattgtgatgatgatgatggtggtggattatgatgacagtggtgatgatggtggtgatgatggtgatgataatgatgatatgatgataatggtgatcgtgatggtgattgtgattatgatgatgatgatggtgatgatggtgatgattgtgatgattgtgatgatgatgatagtggtgatgatggtgatggtggtgatgatgttgatggtggtggtgattataacaatgttaatggtgattatgacaatgatgatgataaagatgattgatgatgatggtgatgacaatgataatatgatgatgacaatgataatatgatgatgatgatgacaatgttgatagtaatgatggtggtgatggcgatgatggtgataataatggtggtgatgatggtggtgatgatgacagtaatgatgatgaagatgatttgatgatgatggcgatgacaatgatgatatggtgatgatgatgacaatgatgatagtgatgatgatgatgatgatgatgatgatgatggtgctgctactgctgatgatggtgatagaccttgtggtatagtggctaaaagaatggagccaggtagtctgggactggatcctagtgctatcacttcctggttacttaacctgggagaaactacttgacctccttttgccccagttccctcatatctgcaggggggcaatgctaatagcatttcacagggttgttgtaaggatttgaacttggaccccaccaaggaggggctggcatatggtaagcatgattaacatgctaactagtgagtattagttcttattggttattatatgattgttgtcttattattttagtagctgtgcaatcttgggcatgctagttaacctctttgagcatcagtttccctatggatgaagtggggacacagtgcctgctgcagaaggccattctgttgctggtggcatgtgtgagagtgcagcacctgccagcccaggttgcctgctcttccctccatgtcagcttggtccctcctcttccttccctcccccgggctgtaaagttccgtagctaagtaaccctggctgatgtgtggcttttggcggtggtgcttacgggagagctgcatgtgccgccgcctcctttgggtgacagctgttcctaggcagatgcctcccccatgttctggagcagtgaaaaaaggggagagcgtcccagatttaaatttggaatccgcacggaattgtgccagcctgcctcggagtccacagggcccatgggccaggtgctctttggggtgactgctctctggacactggcatattggtcacatggctgggtctaagttgggtccttgaagccctgagcacagtgggagtcccagaacagcttctagggctgtggagcagccactgaccccacccgaggagcctctcactcatctgctgggtgaggtgcaggtgggaatactgctgggaaaggtgtgcaggcagcaggagtgagcaagtgagcaagagtgggaccattgatgcccttggtctcagggtgtggcacacacagggcttgcctaccctcgggcagagctctgcccactgctgtgccagccttccagggatctaggatggtccctgggctgggatgggtttcccagatggacacctccacctcgagggtgagggttgccctctgggggctggaggttggtgacattgccaaatctctgcaccatagggagacaagaggggctgctacagccctggagtgtggaggaaaggttggagagggaggtggggaggccagcagccacgttctgagcaggcaggtgctgtggctgcgtggttgctgtcgacttggaggctgccttcttctggaagcagggtgggctcctctggaatctccagccctaaatgttctccttctgccccagatatctgtgtttgcctctggcctgggggtatcctgcaagggtgagctgggtggaccctcctcaaggaggaccagtgggcactcttcatcctagggaaggcaggtggactccccatgaatcctgtcctgggcccgggcaggccgccatcccctgcaccccctcttcccgcccgtcccagctccaggagtgtctgctgtctaagggacagtggtggggacagggtaacaggtcaaacctggtctcgtgggctgacttgcagagtctccctagctctgaggtgtcagagatggccttaaccccaatggccatgtctctgggggaacaccggccaggtagcctgcacaagaagcccaaatccaatggtcacactggctgtcattcctcagaggtggtttcaggggacaagatgatgggtgtcagcaggacccttaggaaatgtcagtcagtcgggtcccggaggggagaccgcactgggcccagcccagcccctggactccccctacagtgctccctgctttgggtgtcaatatcccctaagaacagggcttggactcgatgcataatccattttaatctctccccttcttacttgactttttatatatatctcagaggcaaacattcctagtgaagggttgttttcttcttgcaccttggaggggtcttttcatctgctcaggcaccttcgcatccccgtggatcagggctcagagcagaggagagtcagcagtctctaaattatcatcatctcctacctgcacatgtacacaaaaataagcctgaatgctttttcttagtatgcaatttgctgtctatttttaacttgtacacagagggccaaaaagaaaattccatgaggacatgagagtgcattgaggttgcaggtatacagtcaccaaagaacctgaaataattgccggaatgatatcctctaaaagatgtgagcctctcagagagagagagagagggttcctcttgcaacaggcatcgtgtgtgtgttttatgtcccttctcttctgctgctgtgcacttaattcggttccagccgtgtcagggagactcgagaaaaaaatcccaccattaaagacatgctctttgttttttcaatctgtgaccccagcaatctctttagcaagccatggttcagtgaactggcacacagcagccgttcggcagtggaaaaaatcataaaacagatggaagctttacatttttgtttagtttttaagagcagtttttataacatcgcttaagaccattctgatgcatcatactgtttacactcaaagctttgtagctaagatgtttacagtatggagaatgttttaagatattttatagttttgatatttagataattggcaaggaaaaaaatagtttgttgagattgcagtgatgttgggaaccgtgaagtaacttatgagtctcaataaatatgtccagttcggtggaaagtacaaactcagttaaaacaaaacaacacaagagggaatatctttttagtgaaatcatttccttttcttaatcaaaagatgacaggcagggccttagaacttccatctgtgccacaccacaccacactctgtgcctgctgcttctcctctcgtgattgatagctgcaccccattggtcccttgctattctgcatgagttcatgcagacaccaaagttaataaagttcagttttaggagaccaccttgaaataaacccagggcagcccccctcatctctttgtgcagtagaacttgcagagatttttttttcaatgtcaaagaatttatgcagagctgggatttggaactctttttttttttaactgccccaaaatggcattaatcaaaaacaataactccttttaacttttctaagtgctctaaaggaaagtatgaaataatctgtgtgtgggccacaaatgtggagaatgcaaacatttcacaataaacatgttgaaatgaaagtccctggcaagatagtctgaaagatagtacatgctgggttaattaatgcatactcataaaaataaacctcacttttaagatttgaccaataaaaatcattagcatatttggatcagatgactttatgtatacattgaacttctccatgcaaattgtccttggaaaagcctggaaacagatttcagtttaaagtcaaaactcctcttctgtcttctctttgtgtttccagtacagtgatatgatgatttattctggtttcatctgttatacctgcaattgatctactggtgatgggattaaatttatcattttagatgtataagtcatagttagatagccagaaaaatgtttagttgcataaaaattcccattgtttgctttcgacacacagtgtttgatttttgccgtagtcaaattgctgtagtgcattatttttactccaagatgtttatttatttatatatttatttattttgctatcttaaatggaatcattttggcccattcacaactgctatctttaaaaagatattttcttgagatcatgtattcaaacaaatgtggacttggggttgtggactctgctatgtgctgaggttctgctgaattagacatcacataattttctaagtctaattacagtatggaagattccagttttatgttacgctttttgtacaggaaaagacaaactgctacaaagacctcttcagtatgaagctaacagtaaaaccaaactcattttaaaagaactgaaattgaaattcataaactcagtggaagttaagttgtaactacccagcctgggaaattctgaacctaagataatgctgcattttgaatccttatgaaaataaaaacaacccaacaacaattattgaggaaaaaaactctagcatgagtttaattttatccaactttattggcagcttattttgaactaatgtgcaataaagttgccaagcacagcaattgaaagaagtaagaaaaaaacatttttggttgttttcttacactggtttgttctaataaaggcggtagagaggtcaacacctgaacagataatttgggtgtctgtctcaatcatgcctggcttagtgctttaggtcttatcagtgctgtcattagccacttccactaaaggccaggtgatggtctggctgctgcagggtgttccagggtctgcagtctctgggtctcttgtctcccccaccctcggcccggtggggacagccttgggcccctggataagcccttctatggtagcatcctccaagcttgcctgggaacaggacaagtaccccttcctaagaaagaggctttcacatgaatgtttctggaaaaagggcttgcaagtttgagggttccagcagattataaacagtgtcggcttcataccctcattttgtgccagagactcaacattgcctattttagagactgtgtgtttacgcctccaaaacaaacctctgcatgtgtgtatatttgtccaaaagccacacctagtgattcctggggtgggggagcatctcttcataatatgtatcacaagtgctacttactgatgttagcaagcttctcagctccctgctccatctccagttgaggggccttgacctgggtgaggctccgacttaagggaaacctagaaaaatcctgtgcccaggtggagatgaaggggaggaagaggtgttccagggctactaactggtagtccctggagaaccctatgacatccacgcagtgaaattaaaagctgaagatgtatatagcatgtgcgtgattttcatcatacagaagtcccatagtttccacctgatttttgagggcgttcctttcttgtctgtagctgagaaacagataaacttttgcaagtggacctttcgatgcgaaacactaggagatggtaacctatgcctggataaactgggtgctgcttcaggacaaagatacacatttctgcccctgaagaagtctcacccacagaatgctgggttggatggagggaaaacagcaagaggttggccaactctgagtgcatcctgaaagcgtccctgtttcagtccttaaaaaaaaacttatttcagtcctttttaaggtaatagcttggtgtaacagtcaagatggccatgcgaaagtgtcagagggagcaagccatggcctgtggtgagacccagggaaggtagttgaaggggcccctgtcagaaccccaccatggggtgctgggtttcaggggcacccctgttttggccctgtggtttcccacccctagggcctgcccccagttggcagacaaggacagccagtggcccacacctataatcccagcaactttgggagggtgaggcaggtggatcacctgaggtcaggagttcgcgaccagcctggccaacatggtgaaaccctgtctctactaaaaatacacacacacacacaaatatattggcggcctcctataatcccagctactcgggaggctgagacaggaaaatcacttgaacccgggaggcggaggttgtagagagcagagatcacaccattgcattccagcctgggcaacaagagtgaaactccatctcaaaaaaaaaaaaaaaaaaaaagacaaggatgctgtcacccatatctcagactccatacttgggacatgatgcatccgtcaccttcattcccttctccgagtcagcactggatcttgtgccttgggaattatcagctcttgggtctcccctgtccaacgctgggcctggcctgccacaccttaaaagccctcactgagcgagtccctcgcttgggctggagcagagcaggcaggccatttttttttaaaggctgggcccatggtggcctcggggattcaggttccccatgggcagaaggctctttggagacccctgcattcatcccctcatttcacagttgggaaagtcaaggctagggaagagaagggactcccaaggtcagacagcgagacagtgacttagtgaccagacccaggctcctagttcttggccctgtgatcttgtcactacgtgatactgcttgtctagtgaatggcacatgagtcagccttctgtgggagacacagattggatgctactttctgtaagatttctgcctcctgctggcttatcttttaatatagcatcaacaacagcaacagcaacacaatagcagctactaactcggtaccaggcatattatttttctaaattaattaatactaattcatgatctcctttagtttaattcgttcttgcaacaaccttacgtggtaggtactaccatcatccctattttgcagatgaggaaactggggccggagaggttgtcagatgccccaggtccacagtcagtagtgggggaggaccacgccccgggggctccccccagcatgagtgcactcagctcctttctctgttcctgtccccagccctgtgagaagactccaggtttgacagagctgagcattttcctctttgaaccagctatgtctctgttttatgtacatagatgggcaagaagtactggcttttatttatggcactgggatataaaatttccactggacacacattgatttaaggaaatctgtggtcagtttcaagaagtgtcttcaccagtttatggtaaaggtataagcagatgtggtaatagcatgaaggtggcaggcaacgtggttggaatttggtcagcactgtcccatgtctacttaaggtagaagaaaagaaaaaaatgtagtgactccacttttagaaatttcaaatgagtccttatctgccttctgggagagagaagccccagtgacatcttatgaccaggtcattgaaggcagagagtctcggatgcttagttttcctacatgcatctaagggagccatgctcgacccaccagcgggagccacagatccatgaagtctgcagtcttcatccagtgtcatcccggggactaggtcggcctacctgaaaggggactggcctctggcttggaatcagtggcagagctggaggcagaaggaaggaggaggtggcaaattgggaccgggaggcatcagtcgggagggctggagagtgtctcattcaaactcccgtgtacagcacttgtgctttgttgcctagtgtgaccaggttgatgactgtagctggcatgcaccccagatgactaccagacattcaggataagtcttccatgccactatgatgctgccacagtgttacagattcactgccatcggaaaggctgtaggacagtggttctcaaactggcttccaagggaccccaagggtttccaaggagacaccttgggagccaggagaagggaagggctcagggttcttctccgcagctatgggcaaagcaactgtgctattatcagctcatatgggagaagatttcctcgggaaaaggattctgctactaggaaacgctgacaaatcatatatttagaccaaattttattctttttctaaaattttatttatttataacttttgttttaagttcaggggtacctgtgcaggtttgttacataggtaaacttgtgttctggaagtttgttgtatagattagttgtcacccaggtatttaggttactacccattagatgtttttcctgatcctctccctcctcccaccctccaccctctgagaggccccagtgtgttttgttcccctctctgtgtccatgtgttctcatcatttagttcccacttataagtgagtgagaacatgcagtatttggttttctattcctgtgtgagtttgctaaggataatggcttccagctccatccttattccttcaaaggacatgatcttgttcttttttatggctgcatagtattccatggtgtgtatgtaccacattttctttatccagtgtaccattgatgagcatttaggttgattccatgagtttgctattgtaaataatgctgcaatgaacatacgcatacatgtctctctttataacagaacaatttatgttcctttgggtatatacccagtaatgggattgctaggtcaaatggtatttctgtttttaggtctttgaggaatcaacacagtcttccacaatggtggaagtagtttacacttccaccagcagtgtgtaagcattcctttttctccacaacctagccagcatctgttattttttgacgttttaatagccattctgattggtgtgagatggtatttcactgtggttttgatttgcatttctctaatgatcagcgatgttgaagggctttttttttttttatatgattcttggccgcatgtatgccttcttttgaaaagttagaccaaattcttgattctgcagatgggaaaccaaattcctcagaagatcaaaggattacaaagatcaactctgtacagtcatttaaaatagagaatgtctttattcaagcatatcggtggagctttggtagaagaaataaaacatactctgaaaggtgacacgagggttcctctggtctagccgcctgctttttgggcagcctggcagctagaacatttgatagaggtggatatctgcctgggaccaagctttccgccacagggggcccagagcctgcaagacagaactgctcatcgtatccacccatgatggctggaagttgagtatttatggggtgccagggccatgagccaagctctttcatttatgatctccattctacagatgaagaaatggaggctcggggtcaggatgtgacttatcagcaggagcctactgggctctggtccagggtctgtgctctcagccactgcggcccctgctcccgggaagaatgtcttggtgtctagtaggattgcactgaggtatacagggccaggggtctcattgtcagaaacacccagaacgaatcctcccctcttgaagattcagacagaagaaataggaatattcctatctcccctttcctgacactgcaagggtttttgcaaaatgctcctagctgccccacagggtttctagaagtctgtgtgctttgaaacattggaggggagacaaagatgggtgaccaaacccctaaacagcaaacaggcaggggccctacttaggatgtcttctcctatgtcttacttcaacccgccacgtgggcatgctggagacgcccatgtgtgtacttgttgatgacaagattccaatgatgttctttcatccattcatgaagtatttttgatttacatgtgtttatgcatttacccattaattcatgcatttattactttttacattccttcaatcatctttctatttctccatccatccatttatacatgcccttatgcattcattcacctcttcatacatttgttcatgtatgcatttgttagttccttccttcattcaacaaataaaacacgaagaaatgaattaaagcttctggaggaatctgtaatggtttaactgcacccagggtagattctgggcatctttcatatgattggatgcagaggctcactaagttgaataaacagtgtcagggtacctaagaggcatttttttgtggcctgggagaggtgcaggctaaactcatccaccgtgactgtagaattcaaatgtcccttacgtgctgaggtccttgagcctccctctctactttttctccatggactgataatttgtgggcacccctgtgggtcccctcaacaagtcttcctgtgaccctgggacatccttgggttgctcctgagtcctgaggactggcagaatcctccatggggatgcaatggatggttgagtccaagatccagggctgggacatgaaagggcaaggagaggttatctgtcttgagtctcatgagggatgcacacagagcagggcaggagctgcagtggagggcatggaggcaatacaaaagtaccaagtgccatgcagaccaaggtttccttctcttctttcaccaaagagtttccatccattttctttttttttcttttctttttttttttttattttcacgtgatccctgagaggccagcagaatgaatgccagtgcacctgtttcacaggttgagaacccatatttgaaagcacaaatgattgtgtatgaatcaaacacaatccaaagataaggtagaattcctggcaatcgtaataatcttgagtgcaagccaggctaagaatgacacaaagggaagggccttctgcctccaccaaatgagtgaggatgaaacatactgtgtcttctgcctcaagtgctgagttggtgccctggagctaggttgattgttaagatggcttcagtccagacttcttttggtttagtgagatgatattttgttttcacactcaactttacttactgcatagggctccaaatgcatctatgtgccctttctgctttgcagacagtgttccaagtatctggctgcaaagattgggtaagtagagcattcataatggctttcacacatgcaggctggcctggggcacctgttggttccagatgtttatggccttgaccccggtgtgaatgtcatccctccctgcagtgaaggccgaatgagtggtcaggtggaaaatgttcctgccttccttatactggagttaacttccaaggtacagtccttccccatgcattcagaaagccccactccaagaagccaagctcaggtgtcctgtttcacctatgcctcggagtcccacccacattgaacctcaactcatggccaatgagaagcgttcttgctacacactggttccctaggtaaccgagtgtacactcgagaagaactatagagaaaggaagaagtggtaccccacaccctcctctccttggggtctgtgctttatccacctcagccctcgaccctgccctcaccaactagccatctttttgcctgttactctgcttgatttaagatacacagccataaacactcagggcagccagcagcatggccggatataatattaatttcttttctggtttatttgtgaaggagtcaaccatgtaaatcactttaagtcactaagacagaaagtgatatcgcatcttcaaatggagaagtatagtatgttaccattaaaatctaagtagaatatgtgattcaactgaggttgttaatgtgggtatacttttgttaaccttactttcgattgtgtgagatgctccgaaagttgttttttttttctattcattttagtgcaaaccaatggatacctatctgaggtatatcattagaaagtctggtgtctgccggacaatctccttgcaatgccatttttcatgacttgtttaattaacaaccatttttgacctagacttgttataaaagtgttgctattctctcctgctaaattatgtctaatgaacatatttgcatgttatcagatacagcaatatatcatttcaaatttcggcgtttaagcctgcatcactcaaaacagcttttgtggattagtaagcaggtgaaatcaaaaatctcatttcatatctgacattaataactttcagggggaatgagcattggcatttatgtctggaccagaatcgagtccaatgtcctagaaacacaagggcagcagacaaacctactcaccagataggaaaataaatcatgcataatgcagaatttctaccttacatgttaattaatgtgtgcaatcaattactgatgttacaatatgagaaagaaactggtggggaatggggtaataaaaaatacctatagatttatctgcttcttttttctatttaaacaaatagtcttcaagcctgtgaatgctgtgttgagacatgctctgaataataagcatcataaaatctaatcagatttataagaggaattgattgttgtggcaggaggagagggtggaaaataagctgaaatttaagtgttaatttttatgctaatccacagtggcttcatatgaagcaattttgttctgtgccacaaatataaaattgtcccttgcagagaaatgtcagcttgctagacctgaaagcagtaatttattaggtatgtttctattagtatgtgtcacagttgttagcaggctatacacacaatggtgcttcatacttatcctccaagtctcagaatgtttcagctcagtggctggaacgtggggcattaatacattatcatatgcggggtggtctgtgccctgtggacaaaaggctatttaatacaatttaatgtcattctgagaagaagtggaaaaataaagacggggaataaaatggcatctgtgtgtttcactgtgcactcatgcacaaaccctcagtttaagaggtatgacatttctgccaagaaaaagaataaaactggggcattttttttataacctgttccccactgcagtattttctaaatgctattaagtgatcgatttacacggccacatgatgatgtcatctataagaaggggaatgcagatgacagcaaaatactagtgacagtgaccttgtttcagaatccttggaaccctgtcagctttgcttccagtatatggtttcaaagaatgcactttttggacaatatctagttactgggtagtgaattaatagagttaagggttctgatgcaattcacatataggtcaattacatgcgccaacatctgctctgtcactatcatttgcatatagcattcatatgttaatgatgcctctttttactcaagtaatatatttaaaaaacaagatttgcatatcagtttggatcagtatattacaagcaatttatcattttctccttcttgttatgattttaagaacaatatcttgagtgatggctgctatatttgagcacggctctgatttatacaagaaacccctcagtgggaaagcttccattctaaagctgcttaaagccttataaatcaataatgacacagatggactggtgataatctatttagaatgcctgatagcaaatattgttgtacagatgattagagtggtaactgttttagcagaaagcctgtcctctcttggtaaatggtaagtttgaacaaaaaagtgctcgcacatggacttcatgttaggaaatcttcttgctgggtctggattgcaaaggggaaaacatgggggagaagaacaaagggacttcccgctcctgccaatataatcatatcaatccctgtttctttaacaaaacaggacctcttaatggaattgtgtcttcaggtgtaaatagcattaaaagctgcttctcctctcctctttgccctgatagagcacaaggagtgagaaaataaagtggaggttgtcagaagtggcagctgcttggaatcctgataaatataagcttttattgatctgatgaaaatgaaagatcccagtgctaggcagtatttagcttcttgtctacagcacgtcaccggtggccttgcatggggatagatttccattctcatacaccggatttgatttcatctttaaccttttccgttgaatttccttgacctctgcatattgctgtgatttggtgaatttgttacatttcactttacatcatttctttctatatttccttttgtgatagggaacggggacgccccctcttgcaatctgtcagtgcctgcaccaactttatcctttctggggcattttctcaccagactgacagtccttaagacaagtatgcagttaagctgctaaggtaagtcttacgatattagaactccttcttcttcccagacatacctcatttccttctgccttgttgcgttgaccaaacacaaatctaaaccaaatagctcctctgtctcctgcccccggccaggggcttccttgtaccctctccccaacccagataggagtcccgtacctgcccagtaagctctcggtgagtggtggctggcagggcctttccccatgggggaggtattcctttgtggtttgggtgtgtttggggatgggtggggaagaggcacaaagagatcgtgaaaaaatgttattttctcctctgtggcttaaggcctttctgaagttttcttctgagataaagatggggcttcattgcaaaatcctgaggtgctgctaacatattctggttccaagaaagtgctgctgttattttgagtagttttgatacaaccaaatcaaagtgaagatttgaaatagcttttctgaaagcccaagctgaagtcataaattattctgcaccatgattcattctgatagtaaaaccatacttctttgcctgacatcgctgaaatgtggaaaagtgaaagttaaaaataaaatgaaacatttaaatcttggctgttgagaacctcaggtagacatcaaggccagtcgataaaagcctctatcaattaggcttccacggttatcatcagatattggtttattagcaattgcacaggtgccgggttccggtattaagaatcggaagggataagaaaaattcagggaagtaccataaattgagaagcaagggtctggggctccgaggtgcacttgaaggcagagcacgagacagtggtggtgctacggcctcgtgtaatatcgtaggagaaaaatatctgcagcgtaagagtgggaagttttcctttttttaccccctttatttgagttagaaagtgttgatttcacactgtggtgagtgttttccgtcagtttcttggtgggtgtatttcgtgttaagaaaaaggaacagcgaacaccagcagtggtcgcttccatcagtggatgagcagcccccccctggcaccggtgacttctcagagcactgggtctcccctaggcatggtgacaacccacaggcttccgggccccgggcttccagactgagctgtttggctagttccttccacagcatatcgccggcaggagcaatttttggttccatagctgtttggttgggaaaacaagcctgcagttgccagtaaggtttagaatctgcctgccagataagggaatgtctgcgaagactattttccctcttgggaggcaaaacacagatggaggagttaggagccttacaatatttagctgctacattgatggtgaggattctgccacgcggatgctcacagttttggaaggcccagtttagcatccatgcctcaggcctcaggtaggggagaagggtaagactggcttcctccgggggcagtgagtacatcagtttgttctggaacattccactctgcttgcctcccgagatggagaaggtgctgaaagctgccatttcccctgatcccaatcgggatgggtagggaagagaaggatgaactacctgcccaggtgcctgacagggtggagaccgagggggaggaggagaagggacatgtgtgtcctctgggaatgagacacagatatcctttggatgggcttcttggactctgtagaataaacagtagctccagcctcatcagattctctgacacagagagcgggaggaggagaagggacatgtgtgtcctctgggaatgagacacagatatcctttggatgggcttcttggactctgtagaatagacagtagctccagcctcatcagattccctgacacagagggatgcattttattttattgatgtatttattttcgtagagatggggtcttgctctgtcacccaggctggagggcagtggtgcagtcatggctcactgcagccttgacctcctgggctcaagcaatcctccctccttggcgtcccaacgtattggaattacaggcgtgatctactacacctgatcatggcatgcattttaaaaaattaactgccctggcatgctgtgggcctcctagaagataaagaacaattacgtgttctgtgggattggccacataaaggtagggagattttcccagactggaaatatacatcctggaataatttctgggtcacatgaactggaaggaggattgagactttgtatccaaaaataaattttgtcccctggagaccaagaaagggggcaggtattagaaacaggcagagaacatgtgagcaccatcctccctgcccctcgctgactttcaggctctagaccacaggcttcttgggccctgaagttgaatcctgccccaggtagtctggaccttggatgagctggttaagaatgggttggaagtaggctaattcagccccagagccttttctggactttcagagtttcctgctgggactcttggtgcttctcttcatcaatgccctcccgattctttgcactagacacttgtccttttggagtcttatgtattaggccctgtttttgatgctgtaaagaaatacccaaggctgggtgatttataaagaaagcaggtgtatttggctcatggttcttccggctgtacaagcatggcgccagcatctgctcagcttctgcaactgcatgatggtgatgcatcatggagcttttactcacggtggaaggtgaaggagaagcaggagcatcacagggtgagagaggcggcgagggaaggggtgggggaggtcccagactcttttaaacaaccagatcttgtgtgaaccaactgagtgagaactcactcatcaccaatgggatggtgttaaaccactcacgaggcagggtctcgttgttttattttattttactttttcatttggagacagggtctcactgtgtcactcagttggagtgcagtggcgtgattttggctcactgcaacctcgacctcctgggctcatgcgatccccgtgccttagcctcccaagtaactaggactacaagtgcctcccaccgtgcctcgctaatttttgtattttttttgtatagatgtggttttgccatttttcccaggctggtcttgaactcctgggcttaaaccaggggtccccagcctctgggccatgggctggtactgtctgtggcctgttggtaattgggctgtcaagcaggagctgagctgcaggtgattgagtgttactgcctgagctccacctcctgtcagtggctgcattagattttcataggatcccaggccctattgtgaactgcgaatgtgagggatctaggttgcgtgctccttatgagaatctaatgcctgatgatctaaagtggcacagtttcacccgaaactctcaccgcctcccaatccatggaaaagttgtcttccacaaaactggtccctgatgccaaaaagcctgcggacagctggcttaagcatctacctgcctctgcctcccaaagtgcagagattacacatgtaagccactgtgcctggcccagagtgccactcttaagcactgattacataaacattgaggcaaccgttggtaactaaataaatcacacacatcagacaatgatttcatgtcccaccacaatgtagatttccagagagctctttgcaaagattggaggcagaatttcagggcatggttgtccagccttctatagctttatcctttagaaagacctcatgttcaggttgggaggcccagtgacttccagaaggaaaggcactcagagcctatagaaccctccttttatgtaacagacaaactgtgtcccaggcacttgcaggactctggggaccctgggcagtctgcacttcaggtgctgatcctgcggtgggctgggctgtcccgagtcagcccctccgtcctggtacagatgagtgagtcaacatccttcctgcagcagtaattaccttagttaaatgctgcaggagtggtactttgggagcacagaggagggagtgaataattgtaatttctatgtgataatgatgataagccatgcacatgtctatggggctttgcatcatattcgatcttcaccatgagatctctgggcttttggaagaaaagatcccagcaaactcctttgtagctgctgaatgagatcggtgtgtaaggtcccacggtggacactttcccagggagaaaaccaaaatcagagataattttaactctagagagaagatagagtggagctcattctcgcatgtgcatttcttgatatcatctcaattaatcctcccaaatcccctagcaggtagtagatagtatgattcattccattttccagatgtgggatctgaggccagagaagtggcctgccccaaacctgggagggccaggtctgagcatagctcttcctgacctcagagcctgatcccttcttcctgcctcaaacctggtggttcgagcatggttcttcccaattttagagcctgaactcttagctcttgcactgggcacaatgttggacaagacagacaagggccctgtcctcagaggactgataatatgggcgttgagggtggggagcagtaaacaaggaaaccagtggatatgatgacatcacagagcaataaatgcataagaaaatgaagcaggagaatgggtggggaaggacaggggtagtatctgtacttgagagagggtaggtggtcaggggaggcccccctaaggaagggacgctggtagctagaggtctggaggacatggaggggccagagcagggtgaagttctgggaagagcattggagcagaaagaacagcatgtgcaaaggcctcatggcggggaagagcgtggcatgtctaagggacagcgtgtaggccagcgtggccagacagtgatccctggggagaggatgggtggggtggagggcctttatcaggcgtggctttgtaggccatgctgatgagtgtgaactttcatgtttaaccagagggagtgtcttgagaaacccttttcgggtgcggagatgctcctaggtgccaggaatgagtggcttggattggctcttggtggccttcgttttcctctggagggatgagctggtgatttgtccaaagctgggaattagggatttcaggctcttcggtgcaagaaagatggacagcagcactggggatcctgctcttgaagcagcagggcccggtagctcctcaggccctggcatgagctttctgtgcagccccgggaggcctgagcctcccagctgtgggcgcctggggagagtgacaggcagagggcttctggaaggtatcacaggccgcttaacttctctcacctcaggtcccacatcagcccacagagtccagctgtgctgccctgcccaactattgctcacctcttccttgtacagactctgcttcttcctttgatcagggaggcttggtttggctaagtctgtgcccagaagagaagagtgaccctcagggagttgcagacatctcctgttcactgcagggaaactgggtcattatgggtcatcatgggtcatcatgcacgcagggtgagtttaagggtaaagagtcttggtgcttatagtttaggcctctttcccttgggcagtgcaggtattattgccaagtggtactgtcctcctgaattctagatcattcctaggcttatggaacccttgggttagcagaaacctttatgatcaaagccaccttccttttatgggtgagaaggccggggctcagagagggtaagggactggcccaggatcatacagcaaatcattagcagagccagaaccagaacccacgcatttatgtttatgtccagctcagttctcacctgaacacagtaggccctcctcacctcccccgggatgcccaggcagatccagacagtttgggggccacttgtggtaaactgaggctccagcttgtgtctgggtggtggggtttgtgtcttctccatctcagtagctctcacagcccctagggccgttcctggcccactgagtggttagcaatcactgttgtgttgattgactagcccccttgcttctgaaacttgtaatcattagaacttgttgcattgtggtttaagcaaaccaaatatatgacaaatccacatttctttctgaattttctgatatgcaggaatggcaagacccaaggtctgtccaagtctaacttgtgccaatactcgggatgcaatcaggccaggacgctggccctgagtttctggtatctggacaggtgatttcggatgcccttcagggattccagcaggcccattttagggtcagaccatgaaagttttggacaaagacaatcaaggctgaagcagctcaggctggggcacgttttggactctgctcctgaatgtgttcctatggcccaccctgtcactgtgtgacctgggcaggtctcttcactcttggggagctgtcatagccccaaattcagagtgcaattggcaaatgcatggagctgagtgtgcacacagcagcctggggaaagccggcccatcaaaagggaccgccactaccacctagcttccatccattgcagccgcctaggagtgtgggccgagtttgtccaggttttcggagttttaaaagtcagaaaaaaaggaatccagttctttttaaaaatttgtctctgttgttggtaacaaattcaagttttcaaaacactttgtgtaaacacaagtgtgtgtgtggactggctggagctggggcctgtatttggtgattcctgagcacaggggcagacacagtgtgcatggtgtggggagggctctctgcaaggagtggccagtgcggccctgagctgcccccgggacagcctggtctggagtgtatgaggtgcaaatggcttggagcattgcaggtccctggccccacgcttctcctggccctgagttctcctgctgctgaatatggctgcgccacagggaggccagcgaccgttcctgactgcatggggtaaggccgttgctcagatgtgggcagcaatgcagaagtccctatcttctgggggaggcagtcaggatgcccctctgcaggcatctggttccaccttccttcctgtctccccggcacctgagttacagggtgcccacccatcctatcaatgtcggcagtggggatgagggaggggatggccaagttccatccttgtgggcagttggacgacccctccccacaccacttgggtaagggctgcttgggaaaacacttctgcctcctctgagtctgattctgccctcacgtgtagctgatccactgacttttctccccttcatttggtggaggtcctgatccttcaccatgctgactgaagctttctctgggctgcaactggacaggggcagttgacccagggcctacactgaccctgggacaggcagaaggacaagatgctttctgtggtatgaggccacctgctgagtgagagaaagtgtcagggctgccctgcccacctattgctcacctcttcctggtccagactcttctccttcctcaaagggagccaaagacctcagcttcccccatatgaagagtctgcgggtcagagaggcaagcaggtggcccagcatcttcagagctgggggaggagatcggggcaggcccccagatagctgctgagcatttccttctaccgaaagtaccacgcagcgagcttgggcgtagtgaaagtgcttgggaaggggtcggctcggctctgggcctcacctcctgttggcccctgcccggctcccttgatttctgtactctcccttcatcctgttcacatgcaacatggagtttctgtgtgtgtaatattatttgtttttatttctgtaatccctttattgtttgcacaactgctgtcagactgttgcctgaaagtatcacaggataattgcagaacgcctgcataagtaatttcttatgaaatcgggccttgtctgcatataaaattgttttttgttgctgcatgcatggactttattatatcgaggctgtttacagggcttgcacctttcccacaggccacagagatgggagtgtctgacgccaggaaataatgaaacacgatcagtattcttttttggtcagatgacatttctggaaggtgatagtcggtctgacgcggtcagaaagagcctggccttggaaggagggaaggcgtttgctgaaatggggactcggggtccgacttcccaggattctgctggggaagaccactggctaagcccgccttgcactgggcatttcttctgaccacatttctgcgatattaatggtgtgtggtagtgaaagaaatgtgttttattctcgagtctaaccctgctgttatcaaagtaacttccagcttattagcgacaaaggacttttctcctctctgctgccctgttcgccagggcttcctgaattaaactgctgtttcctgtcctttatatgcatgaccacatctgggtagcctgctcacagccctgctgcttaataacaatcaccttccctttcagtctctgttgattgtttctaattcactctgacagatagtgcctgacaacttgccggcttttccctccctccgtgacctgaagttactcacagcacttatatagtctgtcatttttaatatttgatttcattttaagttatgtgttttactgagaagatgaaaccaaaaaaaaaggggacttgtaatggaacataaatttaacccttcttgccattcggcacccgacgggagaactctccctgtgtgcctgggcgacagcttctccttttctggaatccttgatgctgctactgctgctggattttcttctctttccttccttctttttttctcttctttttcttttttcttttcttttctttttttttaagccttctttttttcacttctggaaacaaaagctttatgtcatatttttttccctttaatggggcttgattactttatggagctaattatggtgctttttgctttgtaatgagggtccaattgttagagatttggggggctttgctatggagggagggcatccggggagaggcctggtgaagtggaaatgactggcttccatgaaggcgtcaaacacgcgccatggacccttctttttggaggtctttctctttgtgccagctgttggtgcagagaaatgccacttctctctgggcttgggatgtgccactcagagtaggaccttccaaagagtggggaccaggtgggtggtggggttgagcctggacgtaaatttcttctgccacgttcactctgaatctgcccctgcgggcggcctggcaaggcaggcgtcctccagggtggggtgggtggggcgggcatcccacatcacttcagggtccactccgctgtgactttgccttttgtttgacataagacaaaggctcctgtgtccctcttggcccttcagaggtcgagagctgtgaggccgtgcattaggtcagctttgcaaatagacaccaccaactaaaaaaggaggcacattaacccatgacgcctcactgctgctgctggtcctactgtactgcgggtgtctgtctgtttcgcacagtggggcacgggcagttgagaaagtgcaggaagagagatctgggttggatctcagtttgaaacatttcaacttcaccatcgtccatggcccagcctccctggaaccaaagctcctctgagtctgggagctgccactctcaaggccctgtccaagggttttcagatacttgcagtggcaattgtgccaggggcagaggtgtgctagtcctccaggcagaggcgggcggctttcctagtgagctccggaagatgagagccgcatctcaacactttgttgtaaaggtagtcagctgggaacagcatgatgcagtctggtcctctaggaggccactttgcagaaagtactaggcctggactccaaagaagcaaagggcctccaggtagggctggctccactgtccatggtgcagacattctggccacttccctgctgttctacgactcttggctccaggcctgtggaaggaagtcgtgcaggggcagctactcctgtcttgacccagctactcccaccatgactcatttgcctggagagtttcctttgccaagcctactccttcaagaaccttggtccttgaaggacttccttccacaggcctggaatgtttgaggtttagcctccagcaaggccaaatcaagattttttctttctcctccccacaaaggactgttgggcttaccattggttcttggttcttgtttatgagtgtgagaggccaggggcagtggctcactcctataatcccagcactttgggaggccgatgtgggcagatcacaaagctgggagtttgagaccagcctggccaataaggtaaaaccccgtctctactaaaaatacaaaaattagccaggcgtgatggtgcgtgcctgtagtctcagctacttgggaggctgaggccagagaatcgcttgaacccgggaggcagaggttccagtgagccaagattgtgccactgcactccagcctgggcaacgcagcgagactccatctcaaaaaaaaaaaagtgtgagagaaattggggtttgaaattaaggaaaaactttgacgtggctctcgtgcagcaggtctttatgacgtggtgggctgggacaagctccctggaactctaggctgacaaaaggagggggacacagtatttcccgacctattccccacctgcccagagcgctgcaatccagatcttctgtgcacctagcatcggcagcatgtatgttcagttagcactgaagtctggatgaccctcggtggcactgctgttgtgaccccttgagttttctcaggaggcagcctatcaccagggctgtggattcgcggggacctgagaattcattgaaaactgacaactgagcctaaaaggacgttgcctgtagggaagtaaggtgcgcactttttcagtacactctgagctggcagaagcatacacagagcctggctactctacccggaaccaccatcctaggcaatgatgggctacagctacagacgggaagaacctacacatcacaaaccacatcgcaaagtagaacacaaccagtgccacctccgagattcaatggagagccatgaattctcaggcgagatggagagatcagttaataaaagcaataagaataaattgttgactgataataaaggagctaataattgttgtgcacttcctctgtgctcagcactgtgcaatcatttaaagagaggaaaaactgggctagttttgaggccaggaagagcttcatggaagggctggccttggagctggaccttgagagaccaggaaaatattcaccaatcgagatgggagaaggcaagagagaagcttcttgcagaaggcaggggtttgtcagatgcatttgcagatttaggagggggaattgaagtggtcattcccagcagatgcaagagagggggaatctggaaaaactgagggcagataggtgtgttggagaatgttaagcatctctgtttcattggaacttaggatacaggtgtgagatgtataggatatagcataagagcaggcaagcgtggaggtgtaggctggagccccacggtgaacaaagctgtgtgcccaattaaggtatttgtgactcactgggatatagccaagaatggagccgctagaaaaccatttgctgaactgacacagggaaagtgggaatgggagaaagagagtcaccctagccaggcacagaggctcatgtctgtaatcccagcattttgggaggctgaggtgggcagatcacttgagcctaggagttcaagaccagcttagacaacatagggagaccccatctctacaaaaatatacaaaaattagctgggcatggtggcgtgcacctgcaatcctagctactcgggaggctgaggtgggaggatggcttgagcccaggggtcagtgagccaagatcccaccattgcatgccaacttggatgacagagaaagatcctgtcttaaaaaataaaaataaaagagaatcacttcaccagcctcttgcagaacttgctgttgcctttctctcgattgaggcttatagtgactgcaggaagaaagatggaaattgggacaagctaagtttggggtgtccagaaagtgtccagcctgcacagggtgcattgcaggcagtcccagcacgctctcaggccagggcatgaactgtatacaagcaacttggccttaaggtaacagcaaaaagtgatgactctttagaaaagaaaaacaccctttatattcatcagggtcatatgcgtttttcttttcatatgtatacaaaagaggtactttgggtgatacaaggggtatatgccaatgtcaagagcaggcaagaacaatggaaaaattagcagattcatcagttctcctgcttatacttcagttccaagagtaaaatgttagtttgttcaactctgcgctttacgccttgatcacagtgtgaaaagtgttgactaagcttagcttcctggtcagagggtcaagacccgtggcttttaaacatgcttatatgaaatccaaacattcatggtcactagtgatctgaaatcaaggcacaacttatgaaatgaacacgtaattatcttgtttactcagggtataaatagagttcatgcattttaaaatttttcttcctgaaaaggacttgcgccagcatttggtctttagataggcatgtgctctctctctctctctgtctctctgatgctcttgttctttctcttcttcatctttttcctcctgtccctgttcctccccaaactttccttctcccctcccctctctgttgtctttctctcttccctctctcttcctccccctctctctcctttagaagggaagggacttgctagtgcttgttgcccctgcaagaggcaggaacagccattgcagttctttctaggagtatttcctgcttcccacacagctttggtggggggaagatgctgcccagggaatccctggtgtgcttgaacatagcattgccacttctatgaatgcaggcaagggccacgaagcccacgtctgcttcagacaacccagctgaccaccaggtcccgtgtagcaaggactcccgtggaggtaaccttcccaggcactccctgtgaggctctgcttctgcggggaatgagaggactgactccttagctctaagctggccacttccagcattcccacacctaattttggagtttttccagagtgagaaccacctgcttgtggactttaatagtttttaagtaggcacactttttcccataacatattatatttagctttgtcctggataataatagctacgaaatctctggttgaatttgccagttatatatttttcatatgaaacatcagaataattatataagccttcattttttaaaaaaaataggagtttctctatgtatcatctgaaatcttgctatgtgtctggtgatctctgtgcaactttggggcactgtttgggattttcatatctagctgggttcttggaatctagtgcaaggaagtcacccccgccgaacccctgaggaagccccacgtgaactcctccagcccacagtaagttctcctctgtcttcatggtccttccctttgaatccctaattgccatttaatcatatgccgctctggtcatatctgacaacactgtgagcggctgctgggcaatgctttctggctctgtcactttcccttctaaattgcaagactcttgagagtgggcaccatgttcttccgtgtcaggcaaagtgcctgatcaattgagctagctgtcagtctgtctatctgtctattatctacctatcatatctctatctatctatctatctatctatctatctatctatatctatctccttccttccttctttccttccttcctttattcatttcttcctttctccttctctccttcccttccttttctctctagatctatcatcttatctgtcaatctatctatgtatttagcatctctctatatacagatagatctatttacctttcttcctctctagatctatcatttgtctatctatctatctatctatctatctatctatctatctatctatcatctatccatctatcccctattttccctttccactccctctcttctctttcatcctacttgatgagccaggtactgtttttggccctgagaatgtagcagagaacaaaatagccacagtccctgccctcttgtagctgacattccagttggaggagtcaggcaataaatacataaatactattctataggaagaagctagaacaccatttgttagggcaaatgccacaccaagtgttcaaacagggggatctgaagctgagggactgagggctggctgagactgtgtgataagggaaggccctctggggaggagacactgagtcccatggagatggcagcacctggacagaggacacagcaggtgtaaaggccccagggcagtgacagcctggatgagtttgaggagcagaaagaaaatgcaataaaaggatgacacttatttggtttcaacttcgacaagggtcagtttttccatttctcacttgctaggggcagtggccccttttccatggaagaaagtctgacctctcacctctgaaagaccctccgccacatcccttctgctggggtgcttgggacgttccgtgctgttcccttgcagggttggagggtgggaggggagcgtgccgtggtgaggccaccgctgacatgctaatatttcattttaatcttgagtgccaggttacttcctgaatgaagtgtctcagacaaggctctaacttacatgaaataaaagagtttaatgctaattacacatcatctgactaccaaagccatatttattgatggcctaaaaacaccattgaggtggatggactgggtatctgtcttggctagaaatgcacctggagtccctttagactcctttgcaattcacacctgcacgccccatgcatggcaaagcccagggcatgtggatgtggagtgcggggagctggagcgatccctttggctttctctaccagctggatagatcagagccttcaatgcccatttgattcaggaagtctggggtggagcctgagctgctcacctttagcccctgggaagtgctggtgatgctggtcgcgtgacagcagcgcagtgagacatgagagtctggagtagctgaggggcgagcgctctctgatcttggctcctggcctcacagatcacagggaatgacaccgatgagtagagccttgcacttcaccgtcttgcctaccacctcgatctctctcttctccttttccttcttcctgtgtcccagtccttcctcctgcaccttcccatgtcggttttgctgtgggctctccaaggctaagcacagcattttctcatacttgttaaagtatccattgcacagctggaccaccatctcccaccctgtgccttggttctggtcgtctgaacttcatgcctggtctccccacctagactttgagccactgaagggcagagcctctgtccctccctcctactcctgtccctcctgggttcccagattcttcttgtgatgacaaggaagaagcatatactcccccactctctgcaaggagagactcatggagggcagagctggctgcagcagctacatgttgattgaaacgtggtggggtggggcccgaaacacaagtcgtgttcttccagtccatcctccagcttctccttagcgtatcttcttttgaccatatctttcctctcatcagcattctctgaatggtgcacactacggctgcaaaactctagttgccaaatgtgaagtgtcaccaaatcctctccctccatctgtctacacagaaacctcactacctcgcttgcctttgccctttgcaactgaagtcacacggacgtcctgctgatgtgcctgcgagggcaacagcatttccatcagtgtctgaggttgtgaccacctggagaaggcaccctggtggctgtccatggggaatgtgggtttaatgttgctagagctttggatttttcaagcaaaagcaggaatctctatttttacatgaaactcaacacgttgatgacccttacatatctttgcttaaattgccatgtgagccacacaagttatgagttggtggaattcagcgagcagacctcaaggtgtggcctctggtacaaaccaactgtagggaggattccatggattcgacagcggagaatctcaccgggtccaagggaggggactggtggaggctgagtcttcagctgctccgcttgcttggtgaaggattatcacatggaaagggctttgaggactcaggagccattttgcaaacgtagaccctgatgtggctctcaggcctcaggaaaactcattctttataccagcttgtctgtagcccacctataattagcatctgaaatttctaaatgaactgactgatccagtaaatttagcaaacttgttgtgaagtgttaccaactcgtctccctccaactgtccacgcagacgccacactaccttgcttgcctttgctctttggaactgaggtgcttatgtgcactgtctggcagccacgcagacatcccatttatgtgatctataatgagtttattagtgtttcactgccttgttgctattaagttttatcagtttcagcttcaagagcacaaggttaaattttcaatagagttttcgcaaagtttaagtgggattaagattgttaaaaatatgtccaaatggtggaaacatgtatttggtttgatgatactatttctgcccactcaaggattttgatctcttatttataaatgtaacacttttctgaaaaccagaatggtagcacagggctcggattttctttttgcaaatgaaacatgaatgcattaaatgtggaggatcacactgaagctgtgtcaattgagtccgacccgtctgcgattgtgcagtctagatgttgctgtcactgtcccggggtgtggtttttgactggctgttgctttgacctggcaaataaaaattgtaaaggaaaagacaaaattcttccacaaattgcaaagggatgaattatgacattattttctccctgtaccataagataagcaggttctcctctgaaaatacatgtgtgcataattgaatattgttaacctgggtctgttctgtaattcttgagcaatttttttttagaaggaaaccaactcaggagtttcttcagtggctgcaatcagaataaagtgtttccacttttagattaagagaaaaaaaaacagtaataggctgggctgttattatggaaagtttattattattggtacataagctagctgggggtttaagcacagagcagttggataatttagctagctcctggatccaattaaaaaaaatatatgttgtgtccacagtggggggatggccatcgctgagaaagcactctaacgtggatggtgacacacctgtggcattctcttggttatacgcagtttgggatgcagaatgctgtaaatcctctcattactgccttagagaaggcagacacttcaaacagttctccatttatctgagattaccagttaaactcgttaaaaagcaactatggcttgttcactcaattggctgttgggaagatttctgtgttctgtagcaatggcgacagcgtggctttgattagtggagtgctatactttttaggggagaccttttctaacttaatttatgactctggttgaatggcgtctgtgctggggtattacgtatttccccaactattgtacctgatgtcaataaaggtgcatttagggaaatttgaactaaaaccccagggtgtttttgttctttggggaaccaatgcgccataaacattttgaacttgagccaacaacctcccctgaccatgattgcaaattactgtagaatgtatggattgctggcggaacactatttgaggaaacctgtattttatagaatgtcacttttatgcacaatccaggcaaaacagaggggaaaaaaactaatttaaacagcagacagtgttctcttgaatgaagattatgacaaagaatgttataaaaatcaagctctaaatatggctttttatttaatcattattacatcaatcatcaatatcaatacttaacagcaagctgataatgtagccagtaggtgaaacagctattaaaaagtgtaaaaaaatgattaatcaggtacgggggatattaatgccctccaattattaaatgataagtacgtatttttggaagtgtttgtttttaataatcaactgtaatattagtttgcaaaaacgtaattgcttcttaattttgcattttagcttctttgtgctgggtacaaaggtagtatgtttctgtagttattgtttgcagcactccgtgtaaaaaatcacgttcatttcaagaagctgttatggtattgattgtggtaaagacttccattaactgaccaatctaaatctcataagtgatgtcaggatagttatgcatttgcttggttcaagtattcagccattatgttagaatgcaggcagtgtctgaatatggctgttaaattatttctaaataccgaaccagaacagcttaacagttctgcagtttgagactgacacaaaaatgacaatctgccacctctttgttttttaaatattaacgctgtattgggatagtatttttggagtaaaaacctgtggcacgagaggataagtgacataaacaaaggcagctgggcttcatgaaataatggaacaataaggcctttgcagccgctctcatcactccagtatgttaattagcattctgttgtggccgcaacactgaaaacatgtaatctgtattggtgtacagtacagctgtgaacacacattcttttttgtgagtccctggagttagccttgccattggcatatgcgtttgggccaaaagtcaagccatcaccactaaaatagcacaccatagcagcaaaatgtcatttgtcttttcttgtttttttttttttgttttttttttctctcccctcaatgccacatgctatccagtgatgtaatctagtatcactgcatctgcctccctgctgtatttttgcaggagggtatctggatatctgtaggggaaaggagggggcattgccagccagcaggagatggaaaaggcagcggccccaaaagagtcaaattagaaaataaattatttctttttgcattatatgtttaaatgcatatatagagaatatatatatatatatgcatatatatgtgtgtgtgtatatatataaagagagaatatatatacattgaagaatctatgcatttaatatctgccacctttttgcatagattcttccttaagtgtcatgaaactagaatccgctgcttgttttcgtaaggtaaaagaagggcagttaatttcagcaccaaggcttggaggaaatgagacctaagaaaaaagaatcagagtaaaatttacccttatttatcatttctatttagaactgggttgacagtctttcatgcatgtacttaggatgggattggctcttcccatttcagagctgacaaaactgaggctgaggcatggtccaaagatgggccctaattgcagggcctttctggcctctgtacagagagagtgaaaacaattggtcattttgagggaaaggggttagcaccagtgagcagaggcagttagtagctgggagcagtgactccagccttcagaggcaggactcagaaaggcctctcttgtgtgattttgctgctcacacgtggcctgctgggagccgcccctggtactgccgggacacggccctgggattttgctgaggccagctttggaacaggggaggtgagtctggagaagagagtttccacgttgtcatcataggatctggactcaagtgaccaaaaccttgcttggatttttacctgatgaagtttgtcttgaaaagtgaaaatggttccatttccattttccctgttctcaaggtaattcagctttctttgtgtgtgagtgtgtgagtgtgtgcaagtgtgtgtgcgtgcagtctccccagcatagaacacccacacatgcacccacccacatgcagacacgcacatactcatgcatggattcttgttcacgaagtacacacccttttgcaaaataatttttgaataaaaaattatagccctttaaatttattataatttagaaagggaccatccgatggttaaaacttttcctataattcctacattaattctctccatcacccgccccccccatctaatctgactgtaccaaaagatttgaaaacaaagcaaaaacaccaaccaaccaaacaaaacaacccacctgcttctaaagtaactttcagactccctgggcaaagattcttgtctctttctgaaagatgagcatgaattctgagctccaaattttgcttttaatctgtctccaacctaattgaaaaattaccataccacacaaagaaaactccgcatcgggatcaccatgctgatccaattgggttctgctttttgacgttagagaaatcaaattgtctggcgatttggtgacatgcttgaatgtccacctgggagaagactaggttaaaagttaatagcacttgtgcttttcttccccccgacctttttttaaactccagtagaacggaactcttccccactggccaggccctcatcctgaatcccttgtccagcctggaggtcttctgagagttctcagttggcacctttcccctgacttgtccctgtgaggtaaggcagggctgacactgagattttagttctgttgttcttttttttttcctagaaattcacaccccccaccccttggttaatggctctttaaatattgaaatgcctggaaaaacaaaacaaaataaaataaaatgcagcctgtcaaagaaataagaacaacaacaacaaaaatgttggtatcttttagaatgtgtcttcctagtggtaaaagtatataattaataggagaattttcctccagatgtggctatactataatagagccttataaatgctacagaaagaaaaattgcttggaacgaaggcgtcctcaatgagagcacacctgggtctgacaaagattgcatttagggactgctgtgctatcacaacgcagagaaagaccaagtctctgggagcagctggagagaaagccccggcaaatctgcatgcaaatagcagcacattgttaacttaatcagatgccgaggaaagatgtgccagaattccaggatgatctacacacacggaggaggagcggcctgagctgcagtgggagccggggccaaggtgggcctcagcaaggtgcacgcggcccggccccagccccagggccgcagcccacccgccgcccgcctgttttccgggcctgcagtcaattcaccacataatgcccgattcgctctttgcaaagatagaaacgatagagcgtatttcaatgggatggaagctttattattattattttttaatggtgatataggtatgggcattatttcgcctgagtccgtaactccaattaaataatatttctgcttaaatatccgggtgcatgaagataagaaatattgccctggagtgtataaagaaagagtttttttttcaataagaaaagtagttctctataggttgaagtgctgggtataaattgcaccttaagaagaagtggaagacacctgttatttatattttatattaatattaatggaaatatatatatcttaaatctccatcttttagtctagcaccgtaaaaaatataaagtaatactatttaatcacccacagcttaatagtgccttagttgtttactgccattgcactaattgctctgtactaatgtgtttttctgtgatatccagtagtgctaagagaacagagatccataaccaattaaatatagtgtttttttttaatgttaaaaatatatctggtgaggctagaaaaggaatagaaaccgccctgaagaaaggcgccttggcaccgcctcggtgcccaccagaaggtgcccggattgcctcttttgcgcaaagacaaagggggtaattttttggcaagaaaacaaacccaaggaaaacacaacaaactgagtgttgtttttttttctttccctcctgcaacttctcggaccgtctctgccctctctcctccagagagggcgagtttcatcctggagggaggccgggggagctgcgaggccacccccagccggcgcccgggcggattgcgagcccccgcgggtccggccgggggagcggagactggccccccgcccgggctggggcgcctgccgcccgcgagccggaagagcgccccattcacgagcaggcagccctggcagagggttaattgaggatcattgttgttggttccaggaggagcgaagcgcctggagatcgggcgcgcgggcgcggctctgggagcgggggaaggtgaggggaaatgggacatgatggcattaataatcgttaccaaagacggtgggagtaacaaaggaatgcgtctccgagacgccgcccagccccggggtgttttctggcgcggtcgcggtgcaggaacgcgagccccgccgccgagcctcccgccgcctgcgttcgttggcgcggcgcccggcggtagtgccaccccgaggccgagcgctgcccccgccggcccgcggctgccagccggccctgcccgcgcccgggccccgcgagcggccgcacttcaccttacggaggggagataatgagatcaattagaggcgccgtcaccgcgccggagacagctgccgccgcatagtaatcacccgcgggctgggtgcgcgggggctccccgctacctgcgcgcctgctgctcccaccacgcggcaccgacccgggcgcgcccccggcccctgtccgcagcccacagccacaccgcgcaccctacaccctccttgcgcctctgctggggagctcaccccctccactcgcacagtgcgctgcggcccggggtgtgggaggtcccgggacttggggtgtgagtgcctgtgtgggggtaggggcaggtgtccgcttgtgcgcatatgggcatgagtgtacatggcgtgtgcctggagatgggcgagtgcaggctggaatgtgccggcgtggcacgtgtgtgggcccaaatagatgcgtgtgtgatcacatgttgtgttcgtgtttgcacctcgtgtgcctgtgtgtccgtatttgagtgcttacaggaatgtgggtggtgagtacccgtatgtgggtgctatctgcacttgtatgcgtgtgtgtgtgtaggcgcgtgtgtgtgcgtgtgtgtgttagggatacgtgtagatgtgcattagtgtgactgtgtgtgctcatgtgcctgtgcacgtgtgtttgaggtttgtgtgcatgggtagcgtctgtgagagccatgtgtatatctgcatgggtgatgagtgtgtgaatgagtgtgcgcgggtgcccactccatgtgagtgtatgcccatgtgtgtgcttgatgtcttgagggtggggacagctgctgtagcgccctctccctcaaccccttgtcctctagtggctccatgggtaccaaggtttctttgccaggcagttgtccctgaggaaatttccagtgcccagtctccctggtccataccttggcatcccctctcccccaatccctatacacgcctttgttgagggtgatggtgatggtggctcttgacctccatctgtgtctttgccctggtgtatttgcctttgtcggctggccctgttccaccccgcagagggcgatggtgtctctgacctgagcatagaggtgccttgccatttgctccaccccagccccctgcctcccactacttataccagataatgaggctgggaacagccaccagagccctcacagacccagggtggtgcagcacctgtcaatttcacacagatagcacccactggatactccgtgggtctgggcagggcatctgctcactttcagaaacagaatgggccagggtctgaagaagagtgggaagcagctgtggtgggagtgagctgtggtgggagtgtcagtgagctcagggcctttgcatgggttgtttcctgcctggaggcacttttttcctgtgactctcagctccatggtgtgggttccctcttcagcacatcctccctgacactacccagccagtattcccattcagtcactcacattgtccagttgactcccttgactgccgcctggctcccccattaaagcacatgtgcctccccctgccccgaccccacccccaggctaggaccttaccttcgggttcattgctgcgcccagcatctggctggttctgtgtgcacagtgggtacggggcagatggccaacaggtgtttgcaggcctctgctacttggctgccctgtgggctcatagtccatcaggggaggctggcaggcatgctgggctagggacagggccatcctgacatggggaccctggaaggggatggagcttctctgtcatcgagagagccaacgtggcctgacactggggcaaagatgtgaaggagaaagaaaggggacaactgtctccagacttgcccactagactgaaggcctcatgagggcaggagcctggctcaggttctcgggaaagctggcagcccctctggtctcagagcctcgggatgtggtgggagtcctggatgttacccgtgtgggccgcgctcacagaactcattgtgttacaggaccccaccactcacccaaagttagcctttgggccaggggtttccacactatagtcgcttctgtggtcgccagaatgatgttacgggaaagaggtaccgatccagaccccaagagaggcttcctggatcttgtgtaagaaagaattcagggcgagtccgcagttcaaagcaaaagcaagtttattaagaaagtaaagtggtgaaagtacggctactcgtagacagagtagggcgttcaggaaagtaagaaaaggaatgagtccaccctaggtccaatgctcgtatatataggataaaaaagatcatggggagatgtgctctgctacaagggtttgtgaaaagggagtaattttcttaattactatattttgcaagaattgattttattatctttaaagcaaaattaggaatgcctttgttctcaagatattgggatattaggatactcccaaatctgggtctgttgagtaaccattatcaatctgctcccttaaccataaacatctagcagctaggaatacctcactttctgggaatgcagtccagcaggtctcagcctcattttacccagctcctattcaagatggagttgctctggttcacctgcctctgacagttgggtggattctttgttgcccaataggctcccaaggccaccctctccagctgctgggagtctaatttcaaccctgtctcctcaaatcttgtgcccctgaacaagtgatttggccttgctgatggtctcaacatggtctgagagtccctgtgctgtcttccctaatgccaaaatggacttggcaatgagtggaggcttcttagtcgccccagcctggatgccctaaccaagtttgggtctactttttatgtttttttaaagacaaattttcactcagtcacccaggctggagtgaagtggcacaatcttggctcactgcaaactgcctccgtggttcaagccattcttgtgcctcagcctctcaagtagctgggactacaggcatgagccaccatgcctggctaatttttgtatttttagtagaaatagggttttgccatgttggctagtctggtcttcaactcctgacctcaggtgatctgcctgccttggcctcccaaagtaatgggattacggatgtgagccaccatgtctggctaatttttatatttttagcagagatggggttttgccaggttggccaggttggtctcgaactcctgccacatttgggtcttcccacacatgctagtggtgctgaatcggggtggtttggctccatctgagataatgggaacatcctggctgctcttgaaagttctgccttagacccaactgcatctcccttgaggtctctgcccttcattgtcttctttccatctcctgcattgctccagccgaggtcccttttgctctaaaggagtgggacaggaacaaaaactggtgaactttcttacaggaaagaaaagcatgaaaccttgagtgccccttaacaaggtgggagatggcttgtctctgttctggacctcccgaagttgttcacttcaagttttgaccccctgagggcctcctgtgtgcaaaacgctgtgccagtgctggagggacaaaggtgtgggcctgtgtcttgtctctcccaaaggatgttgacaggggtctggatttcccagagtcccaggcataaggagtgtggggagggggtgatagctccagccctgtccaatgctttggtcctgaagatgggcagttggaaataacacatgtgccgtcaccttgaaaacctcggtcaaatattgtttgaaatatggaggtgatggttattatttttatgtcccaaatgtgatttgttttgaagtttgtgtattctcctgactagagctttcctgacaataccgtgggaaggtttgagtaaggcatccctctcccacttttgtttgtgagggtccagttggtcctggccacttcctgaatggcctctgtgttgggagctcccggtgaggataagaaagagaagccagcctgagctctgtgctgcccggcatgatgacagtgatgtggtcttgattctttgagcgtcagtcatggctcccaagtctggcaaaatggactcctggctgatgtcttctccactgagcctctgcaaccccagtgcgtcatgggggtgtgttgaatgctttctgtggggttgattcctgtcgccataaggaggatggggtggggcagggatgtatcatcgttgccaggagatctgacaggtggaaggggtgaagggtggagaggatcatgggtgaggaccagaaaaggaggggtggggcttgagggtagacaagcagaagggctggggggtgtagtgggtatgcggtgggaggtgggacgatgcccaagtaggctgctcaggggtggtgcagggtggatgaagggaagagatgccataggtgggagtactcattccactggctgcaggggatgctgtaaggggtgctgatgcagctttgcaaagccaccaaggcatgcctgggacctcctgtgactgcccgtcactcaggagctttctctgtgccaggcactgtgctaagtgccctacttaccttgcctaatttcatcttcactggggaagtcctggcgaaggagctgaggcttttgatctgtgaatgagagagctcagatccagaggggtaaaaatttgccagatgtcacagagctggccagtgatggagcagggacttctgagcccaggccaccaccgccgaggacatggccactcttcgtgtttcctgcacagagcagctccagcagggagctgagctgaagaccccaacagaagaagtcaaggcaaaatatagcccaagtcctagtgcattcttcagggagggcctttctgtgaaaacagatttttttttttgccagccgtcagccttttgtcccattttcacatggcccaattagacaattgcaccccctaattagccagccttaggcactacttgttgcctgcatagaaattcacacatggggttaaacgttggcaggaaacttcgtccttgcaaatgggagccgtggtgtcagtgttggagacgggccaccctgcagtgcatggcccagaccatgctaaacccagccaggcccacgagcacccccggagaacccacggctcggccctgagacactgtgaggccacgtgaatctgagttatcagtggccaaaaaagaggggagacacagaagagtcataaatgttaacttttttagcactctgtaattccaaagtgattcaactgatttgtttcaaactctgcaggaaaacccagctgtggcatcagatgtgagccctctcagaccagaaggaaatctcttgcccttcgatgcttagccttaaggcagtgagagggaggaagctgtgttctgatttcccttagaagtgcagcttcctgaaggaggagtgtgtggcattttccagaagactcaggtctggctgcttctcagcaaggaatggtcctgagtccacccaggtgcccgatgcgtgtttcttatttattttaaaataaatttatttatctaaatttatatattgttacatatttttaatttttaattttagagacaggggctcactctgtcacccaggctggagtgcagccatgcaatcaccgctcactgcagcctccaactcctgggctcaggtgatcctctggcctcagcctcctgagtagctgggactgcaggcatgcaccaccatactcagctaattttaaaatttttttgtagagacagggtcttgctatgttgcccaagttggtcttgaactcctggcctcaagctatcctcctacttcagcctaccaaagcactgggattacaggtgtgagccaccaccatgcctggtctatatatatctaataatcagcacaaaccatgcccccagagggagctaatatctcttgattagatcaatgctcctttgcatctcctatgtgccaggcactgtgctggggactgggtgacaggcaagttccttgtttaagttatggggagggagaaggcaggggtggatagaggctacacagtcacctcatacatgaacaggattattcccactggaaaaaagtggaatgtggcagggacagggtgcctcattcagatggggtggtcttgggaggcctctctaaggaagtgacgcttgatctgggactggcatgggaagatggagccaggcttccagacagtgggatcttgcagggcacaggtcccaaggaaggaacaggcctggcacgctggaggatttggggctggagcatgagggaccagggaggtgagatgggaaattaggccataatggccccaggtcccagagcctttgcaccattgcaggctggggcaaggggctaattccaagggccataggaagcctcaaagggtatggatgcggggtggttgatggggaacgttgtaaacaggctttctttccatggcaggggacagtgcaagggacagaagcgttcagagtctgcagggaggtggagctgaccggagcgatctatgtggttctgtgtatttcatctcttggcctgtgtgtccccatcctaatatccttgaagtatcaaagcattgctaaataaatacccatgaagtttgctacaggggaagccagcaaaaagttcttaatttaaattcttgttttggaagagaacaagcagagagaagagaatgctttccattccctggtttaagtctcaatgaaaatggccatgtgagacattttgggtaaaaatgaccttctttggctcccattttggctgatgtgttcacttcttttccacggattgctacctcccctccctgctgcccccgcctgcaaagagacagctctgcatccatgtcccatttccgtgttatggctagcgacagacacagttattagaagaaagttgtccgatttgaattaagcataaacatgtcagcttagtggtctggacaccttgtaagtccttgtgcatcatctgtgcaaagctcttatttgatggtttgatgaagtttcggcaactgcatggtctatccagtgcctcccgtgctttttctccaagacatttgggtggaaaatccacaaaacaataatagatcaatacatttaaattagaactttcaaaaattcaataatggtatttacaaattaataaagcactgtaaagaaaatatctgcacttctttatttagggatacagttaattttttcattgattaagcattcttttggtggatgggatgtgggcagggaattttttttttttctaagaaggaagttctgtgtgaaaactagaagtatttgcgtgtttttggtcccacttgtaagttactaatgcatcacccagacaaaggccgatagtgagggaaggaagtatggcttggcttggcagaagctaccgcagaggtggaatccactggatcccatgtgatctacatggttgtgatgaggatggagggaagggcaggtgtacaaattcctgcggtgggcggctctgacttctgaagcacacaggtgttaactgtgtgaaggaaatttggtataggaaattatcatttagcaaacataaaccagggagctactcttctttgtgcaaaagaatttcccatagaaatccttaaaattagcccagatagtcttgcacaattaaaatcaaatatatttctttttctcctcctaaaaacaacaaacgtggcaggtgtggtggtccacgcctgcaagcccagcactttggaaggtcaaggtgggcggatcacctgaggtcgggagttcgagaccagtctggttaacatggtgaaacccagtctctacgaaatgtataaaacttagctgggcatggtgctgggcacctgtaatcccagctactcgggaggctgaggcaggagaattgcttgaacccaggaggcggaggttgcagtgagctgagaccatgccactgcactccagcctgggcagcagaatgagactctgtctcaaaaacaaagaaacaaacaaacaaaaaaaacaaatgcaactcaggttttcaagactatgcctcctgtatccaggaaggtagatctgtaccttgctaaggtctggggtctgcccagttcagatggtgaacaactgagaaagagttgctgacaagttccaggaggccctgtggaggtggctgcaccccaccaaccactctgctagctggatgtggacacagcctaaaccacgtacacacctgcatgcctgtggcccagggcctgctactcacttactcctcccctttatcctctcttcttctgcccaccttccttcctttctttctctctttctctttctttcttcctttcttccttcctttctttctctctttctctttctttcttcctttcttccttcctttcttttctttctctttctttctttctttctttctttctttctttctttctttctctttctttctttctctttctttctttcttttctttctttctttcttttctttcttttctctttctttctctctttctttctttctccttctttccttccttccttccttccttccttccttccttcctcccccctccctcccttccttctttctttctttcctttcttcctttcccttcccttcccttcccttccctcccctcccctcccctccccttcccttccttcttccactctgccagctggatgtggacacagcctaaaccacatacaccacctgcatgcctgtggccccacggtctgctactcacttactcctcccctttatcctctcttcttctgcccacctctttctctttctttctttctttctttctttctttctttctttctttctttctttctttctttctttctttcgtttccttctttctttctttctccttccttccttccttccatcctccctccctccctccctccctcccttccttctttcctccctccctccctttcttctttctttctttcctttcctcccttccctttccttcccctcccctcccctcccttcccctcccctcccctcccctcccctccccttcccttcccttccttcctttctttctttcccaaaatattgattaaggacccatggcagaccacaggctgtgttaatgctgggggcctggtggcgaagaaggtgtcatggccaagaccctcttgtggatgcacgatcccagtgggctggcacaaagtggacacccagtgcttttcctattgaatcatgtcctgggtgggaccctgctttggttgcatgggaccttcaggcatcgatgtgggtctggacacaggattcttcttcctgcattggatggaaaccagaaacccctgtggagcatgagggtcaaaggtcatccacttcttgcaccctgagggttgagagaggaggaatggcttggaataggggtaccaaatggtgtttagaaaatatgtgttcagccaggcatggtggcttacatctttaatctcagtgctttgggaggccaaggtgggaggattgcttaaggccaggagtttgagactagcctgggcaacagagcaagacactatctccacaaaaataaaataattagccaggcgtggtggcatagcctgtaatcccagctactcaggaggctgaggtgggaggatcccttgagcccaggcagtcgaggctgcagtttgatcacgtcactgccctccagcctgggcgacagagtgagatattgtctctaaaacaaaaaaaaaagcaaacaaaaaacccagctccacctcccattggttgccagtccttgtcacctgcaggataaaggtctaacacccggacttgatgtttgaggccttccctgcagcagctgccccaggcatccttctctttcattcagggtaggaagggcctttccaggagcaggagcagccctgaaatcgggtggaaatggacatgaggaaggaagagccggtggtggagtttgtctagcaaccgcccagagactgagggaggtgatgacccgatgggggtcagtgtgggttgtggtggctgaagcgggaccaggggccacctgcctggggcctgggtgccctgggaagcagtgctggttgcactggggggacagctgcctgacgggtgtctccctgtgggctgggtaacgaccgttaccctggttgcagtgcttcctctcttctcctggagttcctgactgtcctctgtggccttgtcctcattgctcttccctgcttcacccactggttccagtccttgtcacctgcaggataaaggttaacatccggacttgacattcaaggcatctccccaggcatccttctccttcttccagaccctgcatgacaagctgccatctcccagggaatgggcaggacacacctgtccacccctgcgtcttggcttttattattccttctacccatattccacctacttctccccaacttttcagacttgatggtttaccccaggtgcaactccgcctccatcatgaatctcctgtcttctgaaatctgcatgtgcgcactgcctggaggtcccttcagtgatgctgctttgggtccccagctgggtggagccacagccacatagagcatctggtgcttagtgggaccccatggagttatctgaaggagtggcagtgcctggatcactgagctggcagatggacatcagggatcatgtggcaatgtccgtctgtctcactcctaacttaaacttcgattttaaaaaatgtggcccagaacattctgatgtcagctggtgttgcatccaaggcccctcaatactggtcccatcccaccttcccagcttcatctcaggcaacatcctcccatccctcagccctttgcctacgctgtcttagaaagccagccactttttctccttcatctccactccagaaaactccctttcatcctgcaagagccagctgaaaactcacctcactacagaagccaattctcacgctgctctgagtggagttagcccctcactcagctgagctttcatctctgttacctgtgactcttctgaccatgttattgtctctctacagtctctctttatgaatgtctgcccctcctgtctcttacctccttttttgagatagggtctcactctgtcacccaggctggagtgcagtggagtgatcatgggtcactgaagagtcgacctctctgggctcaggtgatcctcctacctcagcctctcaagtagctggtactacagatgcatgccacaatgcctggctatattttaaatgtttggtagagagggggtctcagtatgttccccaggctgttcttgaactccagagctcgagcaatcctcctgccttggcctcccaaaatgttgggattataggcgtgagccatgatgcctggcctcttgtctcttctgacatgtagtgggtctttggtctacatttgccaacctcaatatctgtaggtccctagggcagggcctggcgcacagccagggctataggtattaggtatttatttgtggctttcaggaaccgatttttggtgaaagacacttggaaattagccctgcgtttcacagaacacttctattacagcggaaacagtggcagtgcttgtctgcgggtcgccggcatggacagcaggggactgcttccgagggcttatccaaagtcacagcctatcagcaatttttaagataacacattgacatctgtgtgtttaagattctggtaaaaagatgctagaggaagcaatgtgcagacgagagtcggtctgtttgatgtgtgattgaagtgtcagtggagacacacagagaaaaggtgtttggtcaaagatgaagcaccgttttcatgctgaagatctgccctcactcatgggctccaatgtcccttggctagaacctgtccaggcctcagtatggtaccagagggaggcctggatgtggggagaaaggcaggtgcttagctgatacttgcaaaggaaaatttgcaaaaggggctgtaacagagctgtcgctggttgcagcctgactttgaatcttgctctgagcaggaccgtggggacccgagacttctgcagcccctggttgctgtgggctgggccccaaagaccccattcagggaggctgatgcaggggccatgcttgagagatgcccagaacctgccctcccatggttgacggcggtgagggacccactgcctctttccaagccatttattgccacttaccacgagcttggcttacatctgctgctgagagcagagcgatcccaatttggaagccgtggaggccgtttttcacccacactgacataagccatgactctcgaagctgatgacacacttgagataaggtcaaatgctcaacagaaagggacatttgttgcttaatccctgtttgcagagaggctgcagacactaatggctggaggaatatgtggtccttgtccccaggggacctggctggaaggcagggccctctccactccatcgcttggaaactacttaccctactgcacaggatatcagggaagaggcttggaaagcccagcctagagaggggacttagaccctgcttgagggatggggttggggaatgttctcgagacgcaggtgtccaggctggttggtcagtgggctttgggccctggagggggctgtgtgatgagccaggcaccagctgggtgtctgtgtagataggatggtccataggtggagccccttagaggtcttcttcctgcttcccatgtaatctcctgtggctctcagattttgaggtcaggttttgaggctgtaagaggtgctgatttggccaggatataagtactgggagaaacacgaggggaaaagaaaagacaagggtgtgtctataagatttcccgggggagtgagtcagaatgaacggtggcctacttcagtcaacctgagttaagataaagaagaccatggatcgccttggcctgggacctcggtcaaagtatccgtatggatttcctttctgggtcttggtgctgttgagggaggtcatgtgactttgcctaaatcaagttagatctttctacaattatggatactcggtggggttaggcagggggcttggaggcaccctccagaagccttaatgggggcgaccccgctcctccagccattgtgaccactttgtagggtttattgccccagccctcatggtccactggaaggtgggagttccaccccacagagaccacccagcggtggccatgcccggggcttgccatccaggtgcagagccctccacgatcgcctcgtccctcctgtgcttggcagggcttcttcaacttcttcacttgggggaattttccagggcaagccagtgttgtaggtctaaaccctcacggtgttttcttgcatgccaaggctgttgggagaagctgaatgtgctgttatcaagagaccagttctttagaaacaaatgctatgattttcagaattaggatggagtgtaagattccttctttcttggttaatttatagtagccaatgggaagacagagagagattcctttatgggcttcctccactttccaggcttaaaatcatgtgctgggcccttctacatctcattcagacagctggcaatggccatttatgtagggtgagctgaccaactgcagagggctctatttcctggaattctcccctacaaagcaagtgtagccccttcaggaggtgtaaaggcttgacgacctgtgaggaaggagggagtcccatgccccatctctcttgatttaccaggctcctcttaccatgagccagagaacacaagactgagtgtcaggcctgcctgtttcctttccttgggtgtgggacccccctagtgtgagttcacccagtccgcacacgttccacgtgcctccacgaagccaggcctggttctccaatttccaagtagagttctggtttgcgcagcttttctactcaaagggggtatgcggaaggccaaccatgtggttggtgatactcgtgtatagggtacatttggggagaggtttcctgggagggcgagcacttgcatagagggttatcttagtgcccttgaaaaatctagcgaccatagatgggaccttgcctctcctctactctggacacgagacccttgtaaaaaaaaattccctttttgctcaagatacatgctcctcacccatggatttttaaaaaatcttgtccatgcttcacagctcagaaatctcttaacctgttcagtacagatacgactagtaatgatttgtccccaggggctgtattatggtgacactcatcatgggccattctctgcctttctcattcatgagaaagttccagactgggctaagcgaaggccaagaccagaacccttgaaggtactggcccagaaaatgtcctttgggtgaagaagtggtggtgcccttggctcctgaatcctagcagattctttttctagggactccatttctgtcccgcctaatagcatcctgctggcccaagcagatagcagagagctgctgtgggcccctccagctccctatcttccagaagggccacttggctgctgagtgtggcgcagtgacattttccaacttgagctgctaaggtctctagaaaaagatttttccagcagaattagagaggaaagaaggcttgctgtttctgatatgttttacctaagatttctcaaatggctgctgggatcccaactcctcccagggatttccctcctcaaagatatcttggtagatattcaatgggggacctcagaggtgttcaaggaaggactccatctccattgaggcaggtgctgtgcaggggaaggttttactccttcctaagcacttactgttgcctgaatctacttcctaggggttagctgcaggggggttaaggttgtgttgagtagagagaagagaagagaagcctgctaatttgctttttttcctttactttaatctttagttcagctgcccttagtataaactggaacttataaaataaaaaaatgctagggacttctcctctttctctgttaataagctcgcatgctgaaaaaggtctagatgagaagaaaaggaagcccaagtgagagtagcattaaataaaactctttagggtgaggtgggaccagggtggcaggcagctgcaggggagtttcagtgctagaaagtggagttgaactctccaaagggaaaggctggaggggctgaagtgagtacaggctccccagcccctatgctggtccccacttggccatgccaatcttcctagccaggctctttgagagcaaatcccacattctgccggagagctggaaatccagtcttcttgaggtctgaaggtgcttttatgtttccaaatctatcggagcctggagtgtcctctgtagcccttagaaacagtccatggcaaagtcagggatccccactggcagagcaggaggcaggcagccccgtgagcttactggaggattctaatcaagtgactgggaggccggagctcttggcatcaccgccagcccccgcccccatgtttacactcagcccccgttggcaccaatggggatctcaaacccagcctgggaccttgggagcatctattccaatgtcagaataaacagaaatccccacttgagagtgttatgaatcttctcaacacagcactttataaacctcgggggctacgtgcccttgagtgctggcagcattaatatttattcactagggaccaagttttgcctgcagaagcccatgctggtgcctggaaattctcctgtgatcagagccagaggcagagtcccagctcttgcactgcacatacctgggaaggtggttaggagcaggcctggaatccctcccaacacggccaaatcactcactgccactttgtccctgaggaattccaaaacacaataccacaggatgtcttgcccatttctgatcccaggtccaaagggcccaccttctgccccacatctgtcccagtagacttgactttaaactgcttttgctggctggctgcagtggtgcacacctgtaatcccagcactttgggaggccgaggtgggtcgatcatctgaggtcaggagtttgagactggtctgaccaacatcgtgaaaccccatctctactaaatacaaaaaaatagccgggcatggtggtgcatgcctgtaatctcagctacttgggaggctgaggcaagagaatctcttgaagccgggaggcggaggttgcagtgagctgagatcgcaccattgcactccagcctgggcaacaagagtgaaagtctgtctcaaaaaacaaacaaacaaacaatcaaaaaaactgcttttgttcagggtgaactttattcctggcgcttaattgtaaagaatgataaagtccaggatagaccacagagcgatctgagaaagaccaagagaaagagagaaaaaggtaaaggcacacacagaaaaagaaaaacatgctttcaaattcactgacaaacagcatcttccactaaactttcccttgttctgattgtaactcccagccaccccttagctagctgtctttgaattataattgcctctcaaactcctggtactgtaaccttaaaccttgtaattgtgccccaggacaaatcagtactaatttagctaatgcagtacgtcttagacatctctctagcctccactttgaataaggatatcctccccccttcacccccgccaaaaaaagtgtattttaggaccgatgaagcaagtgtgcatggattctaggttgcggttctcggatgtccggagctgggggccagaggagaggggaggtgctcagcttccaggactctgaggggagaagggagtgagtgtctcctctttcacagccctgggaggactctcagccacaccctttcccttgggaattccagtccttcctaggggaggcccagcgctctcatgggtctcctctagaatttgcaggaaaccagtaggaaaccacagatcccctggggcgagggaggtagggacagaaagattgtgcggttgaatctaaaatatgaagggaggttaggagcagccgccaaagggattccattaaggagaccacagaatttagccttatgaagttcatgcccatgtggagacaacgccagggtagccagagaagggttggaagggctgggatgtagaatccgtgccctgcaccaccgcccggcagcaattatctgcggttagctggttactccgagctgccaactcctgaatgccacggcctcccaactgagcctgagacatggcattttctgagccagtcctccttctttctgtgtgatttccattttttctagggtgtctctgttcttagaagtacatcagataactgctcttaagtgagctaaaattaagctcccaaacaaagagttatgagtgctgttttatttctagagatgaaaattgcacgagtaacttatttatttgactacattacattacagtagaaggaaggagaggactgtggtgcaaaacagtaattaactgttttttctctgtcctgaaaattagtgcatagttagatcaaaatatgacagggtgcacgctcatttaattttttaaattgcttggtaacttcaaataaaaccactgctgtggatctgtaggactgtgtgaatgctgaatactcaatggcattttggaaaccacttctgtatgatctgtatggcacaagatgatagcattcattcatttatctggtcagcaaatattaacgacacctactgtgtgaagctgtctctggggagcagtcatgcgcgctggggaattatgtgagtccaagatgctgaggaacaagaacaatcccctgtatcatttattcgtccatccactcattcattcactcaacaaccacttaggcaacttcatttctgtgttgaggttcctgctcacagtttaatgcggtaggatggggttgggggcgggggagaggaaatgagaactaccaggatacatatgagtcactgaggcttgtttgctgatctgatcaaaagaagcacatgcaaagccatccaagaagagggtctgattcattcatttcttcctatgctcactgattaattcactcattccaaagagtttattgaagacctactgtgccctgcagataggatgatgagtgaaatagacttgatccctctctttatggagcttacagtctggagagaggggcagatgttcgtcagagaatcacatgaaccaatgtgaaatcattagtctggcaggtgccttaaggagaggtgtctggagctcacggagcctctggtcctaggctaggggcagcgtcacattctcaggcaggggttacatggaaacatctcagggaagagcgttccaggcagagggaacagcaagtgcacagaccctgtggcagatggaacttggtgaagatgaaggctgaaaggtgggcagagtgaggctagaggcacagaggaaggggaagctgtgagctgagctggagagaaagattgaggcgacgccacagaggccttgatgaaggattttaggctttatctgaaaagcagtgggtaaagccatcatgtaatgtgaatgttgtttaaggggcaatgtgggcagaatggaagcctgggtgtttggtggtgttggacagggcagtggtggaggagatagagagaaagcagatgtgaaacatgtgtgggaagagctgcctttggtccagagatggaagctgaaggagtcagagtctgcagggctagatgggcaggcagagacagtagggaagggcacgtgcagatggaaaaagggcagctctctatcagatcagtgagcaagcctcagtgactcacactggaggccacaagacctgtaacaatgaacacacgggacccccttggatggttccttaattggtggtccaagacttttccttaaacgactttccttttctccttcttgtgttatagaattgctgaaattttctgaagccagtccaacaggtgtgcccacctattgcctacttatccgtgatgaacccttacacattgggt
